(19) United States
(12) Patent Application Publication
(10) Pub. No.: US 2024/0409893 A1
(43) Pub. Date: Dec. 12, 2024

(54) CAR T CELLS GENERATED BY EFFECTOR PROTEINS AND METHODS RELATED THERETO

(71) Applicant: Mammoth Biosciences, Inc., Brisbane, CA (US)

(72) Inventors: Subhadra JAYARAMAN RUKMINI, Redwood City, CA (US); Pei-Qi LIU, Oakland, CA (US); Lucas Benjamin HARRINGTON, San Francisco, CA (US); Pooja KYATSANDRA NARENDRA, Belmont, CA (US)

(21) Appl. No.: 18/732,352

(22) Filed: Jun. 3, 2024

Related U.S. Application Data
(63) Continuation of application No. PCT/US2022/081042, filed on Dec. 6, 2022.
(60) Provisional application No. 63/286,993, filed on Dec. 7, 2021.
(60) Provisional application No. 63/371,507, filed on Aug. 15, 2022.

(51) Int. Cl. C12N 5/0783; C07K 16/28; C12N 9/22; C12N 15/11; C12N 15/90

(52) U.S. Cl. CPC C12N 5/0636; C07K 16/2803; C12N 9/22; C12N 15/11; C12N 15/907; C07K 2317/73; C07K 2319/00; C12N 2310/20; C12N 2510/00

(57) ABSTRACT

Provided herein are viral vectors comprising nucleotide sequences for production of an effector protein, guide nucleic acids for targeting modification of select genes to abrogate allogeneic immune reactions of T cells, and a donor nucleic acid encoding a chimeric antigen receptor (CAR), and uses thereof. Due to the small nature of the effector proteins provided herein, the viral vectors provided herein have ample room for all needed components for the efficient and robust production of CAR T cells from allogeneic donors. Various compositions, systems, and methods of the present disclosure leverage the activities of these effector proteins for the generation of “off-the-self” CAR T cells.

### CROSS REFERENCE TO RELATED APPLICATIONS

[0001] This application is a continuation of International Patent Application No. PCT/US2022/081042, filed Dec. 6, 2022, which claims the benefit of priority of U.S. Provisional Application No. 63/286,993, filed Dec. 7, 2021, and U.S. Provisional Application No. 63/371,507, filed Aug. 15, 2022, the disclosures of which are incorporated herein by reference in their entirety.

### SEQUENCE LISTING

[0002] The instant application contains a Sequence Listing, which has been submitted via Patent Center. The Sequence Listing titled 203477-704301US_ST26.xml, which was created on May 29, 2024, and is 2,754,572 bytes in size, is hereby incorporated by reference in its entirety.

### FIELD

[0003] The present disclosure relates generally to chimeric antigen receptor (CAR) T cells (CAR T cells) generated by effector proteins, and more specifically to CAR T cells generated by contacting a T cell with a viral vector encoding an effector protein, guide nucleic acids targeting the T-cell receptor alpha-constant (TRAC) gene, the beta-2 microglobulin (B2M) gene and class II major histocompatibility complex transactivator (CIITA gene), and a donor nucleic acid encoding the CAR.

### BACKGROUND

[0004] Programmable nucleases are proteins that bind and cleave nucleic acids in a sequence-specific manner with the assistance of a guide nucleic acid. A programmable nuclease, such as a CRISPR-associated (Cas) protein, may be coupled to a guide nucleic acid that imparts activity or sequence selectivity to the programmable nuclease. The programmable nuclease and guide nucleic acid form a complex that recognizes a target region of a nucleic acid and cleaves the nucleic acid within the target region or at a position adjacent to the target region.

[0005] Guide nucleic acids, sometimes referred to as a CRISPR RNA (crRNA), include a nucleotide sequence that is at least partially complementary to a target nucleic acid. Guide nucleic acids can include additional nucleic acids that impact the activity of the programmable nuclease, which include a trans-activating crRNA (tracrRNA) sequence, at least a portion of which interacts with the programmable nuclease. Alternatively, a tracrRNA can be provided separately from the guide nucleic acid. The tracrRNA may, in some instances, hybridize to a portion of the guide nucleic acid that does not hybridize to the target nucleic acid.

[0006] Programmable nucleases may cleave a variety of nucleic acids in a variety of ways. For example, a programmable nuclease may cleave a single stranded RNA (ssRNA), a double stranded DNA (dsDNA), or a single-stranded DNA (ssDNA). Additionally, programmable nucleases may provide a cis cleavage activity, a trans cleavage activity, a nickase activity, or a combination such activities. Cis cleavage activity is often described as cleavage of a target nucleic acid that is hybridized to a guide nucleic acid, wherein cleavage occurs within or directly adjacent to the region of the target nucleic acid that is hybridized to guide nucleic acid. Trans cleavage activity (sometimes referred to as transcollateral cleavage), is often described as cleavage of ssDNA or ssRNA that is near, but not hybridized to the guide nucleic acid. Trans cleavage activity can be triggered by the hybridization of a guide nucleic acid to the target nucleic acid. Nickase activity is typically described as the selective cleavage of one strand of a dsDNA molecule.

[0007] Although complexes of programmable nucleases and guide nucleic acids are quite flexible in modifying a target nucleic acid, in order for many programmable nucleases to be used therapeutically, such as, for genome editing, they must be efficiently delivered to a target cell, which often means they must be packaged in an appropriate manner to be delivered to a target cell or subject. In some instances, that delivery may include genetically modifying a therapeutic cell, such as a T lymphocyte (T cell), that will be delivered to the subject. Recombinant adeno-associated virus (AAV) vectors are useful delivery platforms for therapeutic genome editing. However, if the AAV vector is loaded with too much cargo (e.g., genome editing components totaling more than 4.5 kb in length), viral production becomes compromised. For example, if the sequence encoding the genome editing tools included a region encoding a Cas9 protein, which is ˜4 kb, a guide nucleic acid, and respective promoters, there would be no substantial space remaining for a donor nucleic acid.

[0008] Selective targeting of T cells by introduction of a chimeric antigen receptor (CAR), which allows for predetermined antigen specific recognition and activation of the T cells in an HLA-independent matter, has become one of the leading areas of development for adoptive immunotherapy, especially in the adoptive cancer immunotherapy setting. However, one of the major limitations of this therapy is a lack of patient compatible T cells.

[0009] Allogeneic donors can be an abundant source of T cells for generating therapeutic CAR T cells, and sometimes are required for treating certain patients, such as an immunodeficient patient. However, use of such T cells presents its own challenges. For example, CAR T cells generated from an allogenic donor T cell can result in graft-versus-host disease (GVHD) when transplanted to a patient, which is induced by donor-derived allogeneic T cells recognizing host-derived normal tissues through their endogenous T-cell receptor (TCR). GVHD can be acute GVHD or chronic GVHD, and lead to loss of therapeutic cells, risk of damage to a number of organs or tissues and even death. Moreover, current in vitro preparation of autologous T cells can be rather laborious and cost intensive, and the quality of the cells can vary.

[0010] Therefore, there is a need for efficient and consistent production of therapeutically sufficient and functional antigen-specific T cells for adoptive immunotherapies. The present disclosure satisfies this need and provides related advantages.

### SUMMARY

[0011] Provided herein, in some aspects, is a viral vector comprising: a) a first nucleotide sequence that encodes an effector protein; b) a second nucleotide sequence that, when transcribed and/or cleaved by the effector protein, produces a first guide nucleic acid, wherein the first guide nucleic acid comprises a sequence that is at least 90% identical or complementary to an equal length portion of a target sequence of a gene encoding human T-cell receptor alpha-constant (TRAC gene); c) a third nucleotide sequence that, when transcribed and/or cleaved by the effector protein, produces a second guide nucleic acid, wherein the second guide nucleic acid comprises a sequence that is at least 90% identical or complementary to an equal length portion of a target sequence of a gene encoding human beta-2 microglobulin (B2M gene); d) a fourth nucleotide sequence that, when transcribed and/or cleaved by the effector protein, produces a third guide nucleic acid, wherein the third guide nucleic acid comprises a sequence that is at least 90% identical or complementary to an equal length portion of a target sequence of a gene encoding human class II major histocompatibility complex transactivator (CIITA gene); and e) a fifth nucleotide sequence that comprises a donor nucleic acid, wherein the donor nucleic acid encodes a chimeric antigen receptor (CAR) and comprises one or more nucleotide sequences for directing integration into the TRAC gene, wherein each of the first guide nucleic acid, the second guide nucleic acid, and the third guide nucleic acid comprise a nucleotide sequence that the effector protein binds.

[0012] In some embodiments, a viral vector provided herein comprises a nucleotide sequence that encodes an effector protein, wherein the effector protein comprises an amino acid sequence described herein. In some embodiments, the effector protein comprises an amino acid sequence that has at least about 85% sequence identity to a sequence selected from the group consisting of SEQ ID NOs: 1-45 or 2435. In some embodiments, the effector protein comprises an amino acid sequence that has at least about 90% sequence identity to a sequence selected from the group consisting of SEQ ID NOs: 1-45 or 2435. In some embodiments, the effector protein comprises an amino acid sequence that has at least about 95% sequence identity to a sequence selected from the group consisting of SEQ ID NOs: 1-45 or 2435. In some embodiments, the effector protein comprises an amino acid sequence that has at least about 98% sequence identity to a sequence selected from the group consisting of SEQ ID NOs: 1-45 or 2435. In some embodiments, the effector protein comprises an amino acid sequence that has at least about 99% sequence identity to a sequence selected from the group consisting of SEQ ID NOs: 1-45 or 2435. In some embodiments, the effector protein comprises an amino acid sequence that is identical to a sequence selected from the group consisting of SEQ ID NOs: 1-45 or 2435. In some embodiments, the effector protein comprises an amino acid sequence that has at least about 85% sequence identity to a sequence selected from the group consisting of SEQ ID NOs: 46-94. In some embodiments, the effector protein comprises an amino acid sequence that has at least about 90% sequence identity to a sequence selected from the group consisting of SEQ ID NOs: 46-94. In some embodiments, the effector protein comprises an amino acid sequence that has at least about 95% sequence identity to a sequence selected from the group consisting of SEQ ID NOs: 46-94. In some embodiments, the effector protein comprises an amino acid sequence that has at least about 98% sequence identity to a sequence selected from the group consisting of SEQ ID NOs: 46-94. In some embodiments, the effector protein comprises an amino acid sequence that has at least about 99% sequence identity to a sequence selected from the group consisting of SEQ ID NOs: 46-94. In some embodiments, the effector protein comprises an amino acid sequence that is identical to a sequence selected from the group consisting of SEQ ID NOs: 46-94. In some embodiments, the effector protein comprises an amino acid sequence that has at least about 85%, at least about 90%, at least about 95%, at least about 98%, at least about 99% sequence identity, or is identical, to a sequence selected from the group consisting of SEQ ID NOs: 95-203.

[0013] In some embodiments, a viral vector provided herein comprises a nucleotide sequence that encodes an effector protein, wherein the effector protein comprises an amino acid sequence of a specified length. In some embodiments, the effector protein comprises an amino acid sequence length that is less than about 600, less than about 500, less than about 450 amino acids, or less than about 400 amino acids. In some embodiments, the effector protein comprises an amino acid sequence length that is at least about 300, at least about 350, at least about 400, or at least about 450 linked amino acids. In some embodiments, the effector protein comprises an amino acid sequence length that is about 300 to about 600 linked amino acids. In some embodiments, the effector protein comprises an amino acid sequence length that is about 400 to about 600 linked amino acids. In some embodiments, the effector protein comprises an amino acid sequence length that is about 450 to about 500 linked amino acids. In some embodiments, the effector protein comprises an amino acid sequence length that is about 420 to about 480 linked amino acids.

[0014] In some embodiments, a viral vector provided herein comprises a nucleotide sequence that, when transcribed and/or cleaved by the effector protein, produces a guide nucleic acid that has one or more features described herein. In some embodiments, the first guide nucleic acid, the second guide nucleic acid, and the third guide nucleic acid are each a guide RNA. In some embodiments, the nucleotide sequence that the effector protein binds is the same for the first guide nucleic acid, the second guide nucleic acid, and the third guide nucleic acid. In some embodiments, the nucleotide sequence that the effector protein binds is different for the first guide nucleic acid, the second guide nucleic acid, and the third guide nucleic acid. In some embodiments, the nucleotide sequence that the effector protein binds for the first guide nucleic acid, the second guide nucleic acid, and the third guide nucleic acid comprise at least about 90%, at least about 95%, at least about 98%, or at least 99% sequence identity to each other. In some embodiments, any one of the first guide nucleic acid, the second guide nucleic acid, and the third guide nucleic acid comprise a tracrRNA sequence. In some embodiments, the tracrRNA sequence comprises the nucleotide sequence of any one of SEQ ID NO: 385-440. In some embodiments, the first guide nucleic acid comprises a sequence that is complementary to an equal length portion of a target sequence of the TRAC gene. In some embodiments, the second guide nucleic acid comprises a sequence that is complementary to an equal length portion of a target sequence of the B2M gene. In some embodiments, the third guide nucleic acid comprises a sequence that is complementary to an equal length portion of a target sequence of the CIITA gene. In some embodiments, the first guide nucleic acid comprises a sequence that is at least 90% identical to an equal length portion of a target sequence of the TRAC gene. In some embodiments, the second guide nucleic acid comprises a sequence that is at least 90% identical to an equal length portion of a target sequence of the B2M gene. In some embodiments, the third guide nucleic acid comprises a sequence that is at least 90% identical to an equal length portion of a target sequence of the CIITA gene. In some embodiments, the first guide nucleic acid comprises a nucleotide sequence of any one of the sequences recited in TABLE 5, TABLE 5.1, TABLE 9, TABLE 9.1, TABLE 10, TABLE 10.1, TABLE 14, and TABLE 14.1. In some embodiments, the second guide nucleic acid comprises a nucleotide sequence of any one of the sequences recited in TABLE 6, TABLE 6.1, TABLE 11, TABLE 11.1, TABLE 12, TABLE 12.1, TABLE 15, and TABLE 15.1. In some embodiments, the third guide nucleic acid comprises a nucleotide sequence of any one of the sequences recited in TABLE 7, TABLE 7.1, TABLE 8, TABLE 13, and TABLE 16.

[0015] In some embodiments, a viral vector provided herein comprises at least one promoter that drives expression of the first guide nucleic acid, the second guide nucleic acid, the third guide nucleic acid, the effector protein, or a combination thereof. In some embodiments, a viral vector provided herein comprises a first promoter that drives expression of the first guide nucleic acid, the second guide nucleic acid, and the third guide nucleic acid as a single RNA transcript, and a second promoter that drives expression of the effector protein. In some embodiments, a viral vector provided herein comprises a first promoter that drives expression of the first guide nucleic acid, a second promoter that drives expression of the second guide nucleic acid, a third promoter that drives expression of the third guide nucleic acid, and a fourth promoter that drives expression of the effector protein.

[0016] In some embodiments, a viral vector provided herein comprises a fifth nucleotide sequence that comprises a donor nucleic acid, wherein the donor nucleic acid encodes a CAR, and wherein the CAR binds to an antigen expressed by a cancer cell. In some embodiments, the antigen is selected from the group consisting of ADRB3, AKAP-4,ALK, Androgen receptor, B7H3, BCMA, BORIS, BST2, CAIX, CD 179a, CD123, CD171, CD19, CD20, CD22, CD24, CD30, CD300LF, CD33, CD38, CD44v6, CD72, CD79a, CD79b, CD97, CEA, CLDN6, CLEC12A, CLL-1, CS-1, CXORF61, CYP1B1, Cyclin B 1, E7, EGFR, EGFRvIII, ELF2M, EMR2, EPCAM, ERBB2 (Her2/neu), ERG (TMPRSS2 ETS fusion gene), ETV6-AML, EphA2, Ephrin B2, FAP, FCAR, FCRL5, FLT3, Folate receptor alpha, Folate receptor beta, Fos-related antigen 1, Fucosyl GMl, GD2, GD3, GM3, GPC3, GPR20, GPRC5D, GloboH, HAVCR1, HMWMAA, HPV E6, IGF-I receptor, IL-13Ra2, IL-11Ra, KIT, LAGE-1a, LAIR1, LCK, LILRA2, LMP2, LY6K, LY75, LewisY, MAD-CT-1, MAD-CT-2, MAGE A1, MAGE-A1, ML-IAP, MUC1, MYCN, MelanA/MARTl, Mesothelin, NA17, NCAM, NY-BR-1, NY-ESO-1, OR51E2, OY- TES 1, PANX3, PAP, PAX3, PAX5, PCTA-1/Galectin 8, PDGFR-beta, PLAC1, PRSS21, PSCA, PSMA, Polysialic acid, Prostase, RAGE-1, ROR1, RU1, RU2, Ras mutant, RhoC, SART3, SSEA-4, SSX2, TAG72, TARP, TEM1/CD248, TEM7R, TGS5, TRP-2, TSHR, Tie 2, Tn Ag, UPK2, VEGFR2, WT1, XAGE1, and IGLL1.

[0017] In some embodiments, a viral vector provided herein comprises two inverted terminal repeats of an AAV.

[0018] Provided herein, in some aspects, is a viral particle comprising a viral vector described herein. In some embodiments, the viral particle is a retrovirus, an adenovirus, an arenavirus, an alphavirus, an AAV, a baculovirus, a vaccinia virus, a herpes simplex virus or a poxvirus. In some embodiments, the viral particle is an AAV.

[0019] Provided herein, in some aspects, is a pharmaceutical composition comprising a viral vector or a viral particle described herein and a pharmaceutically acceptable excipient, carrier or diluent.

[0020] Provided herein, in some aspects, is a method of producing an immunologically compatible CAR T cell comprising: a) contacting ex vivo a T cell with a viral vector described herein, a viral particle described herein, or a pharmaceutical composition described herein for a sufficient period of time to allow for viral transduction of the T cell; and b) culturing the T cell for a sufficient period of time for indels to occur in the TRAC gene, B2M gene and CIITA gene and for integration of the donor nucleic acid into the TRAC gene, thereby producing the immunologically compatible CAR T cell. In some embodiments, the contacting ex vivo comprises at least about 1 hour, at least about 2 hours, at least about 3 hours, at least about 4 hours, at least about 5 hours or at least about 6 hours. In some embodiments, the method comprises using a multiplicity of infection (MOI) of viral vector or viral particle to T cell of about 1×10⁴, about 5×10⁴, about 1×10⁵, about 5×10⁵, about 1×10⁶, about 5×10⁶, about 1×10⁷, about 5×10⁷, about 1×10⁸, about 5×10⁸, about 1×10⁹, about 5×10⁹, about 1×10¹⁰, or about 5×10¹⁰. In some embodiments, the culturing is for at least 1 day, at least 2 days, at least 3 days, at least 4 days, at least 5 days, or at least 6 days. In some embodiments, the culturing is for no more than 7 days, no more than 8 days, no more than 9 days, no more than 10 days, no more than 11 days, no more than 12 days, no more than 13 days, no more than 14 days, no more than 15 days, no more than 16 days, no more than 17 days, no more than 18 days, no more than 19 days, no more than 20 days, no more than 21 days. In some embodiments, the method further comprises freezing the CAR T-cell. In some embodiments, the method comprises no other agent that alters the CAR T-cell's ability to recognize a target cell or pathogen or autoreactivity of the CAR T-cell in a subject. In some embodiments, the indels prevent expression of human T-cell receptor alpha-constant, human beta-2 microglobulin, and human class II major histocompatibility complex transactivator.

[0021] Provided herein, in some aspects, is a method of producing a population of immunologically compatible CAR T cells comprising: a) contacting ex vivo a population of T cells with a viral vector described here, a viral particle described herein, or a pharmaceutical described herein for a sufficient period of time to allow for viral transduction of T cells contained in the population; and b) culturing the population of T cells for sufficient period of time for indels to occur in the TRAC gene, B2M gene and CIITA gene and for integration of the donor nucleic acid into the TRAC gene in at least 50% of the T cells contained in the population, thereby producing the population of immunologically compatible CAR T cells. In some embodiments, the contacting ex vivo comprises at least about 1 hour, at least about 2 hours, at least about 3 hours, at least about 4 hours, at least about 5 hours or at least about 6 hours. In some embodiments, the method comprises a MOI of viral vector or viral particle to T cell of T cell of about 1×10⁴, about 5×10⁴, about 1×10⁵, about 5×10⁵, about 1×10⁶, about 5×10⁶, about 1×10⁷, about 5×10⁷, about 1×10⁸, about 5×10⁸, about 1×10⁹, about 5×10⁹, about 1×10¹⁰, or about 5×10¹⁰. In some embodiments, the culturing is for at least 1 day, at least 2 days, at least 3 days, at least 4 days, at least 5 days, or at least 6 days. In some embodiments, the culturing is for no more than 7 days, no more than 8 days, no more than 9 days, no more than 10 days, no more than 11 days, no more than 12 days, no more than 13 days, no more than 14 days, no more than 15 days, no more than 16 days, no more than 17 days, no more than 18 days, no more than 19 days, no more than 20 days, or no more than 21 days. In some embodiments, the method comprises no other agent that alters the T cells′, contained in the population, ability to recognize a target cell or pathogen or autoreactivity of the T cells contained in the population in a subject. In some embodiments, the period of time is sufficient for at least 55% of the T cells contained in the population to have indels occur in the TRAC gene, B2M gene and CIITA gene and integration of the donor nucleic acid. In some embodiments, the period of time is sufficient for at least 60% of the T cells contained in the population to have indels occur in the TRAC gene, B2M gene and CIITA gene and integration of the donor nucleic acid. In some embodiments, the period of time is sufficient for at least 65% of the T cells contained in the population to have indels occur in the TRAC gene, B2M gene and CIITA gene and integration of the donor nucleic acid. In some embodiments, the period of time is sufficient for at least 75% of the T cells contained in the population to have indels occur in the TRAC gene, B2M gene and CIITA gene and integration of the donor nucleic acid. In some embodiments, the period of time is sufficient for at least 80% of the T cells contained in the population to have indels occur in of TRAC gene, B2M gene and CIITA gene and integration of the donor nucleic acid. In some embodiments, the number of T cells that are killed during the method is no more than 1% based on the number of T cells present in the population at the start of the method. In some embodiments, the number of T cells that are killed during the method is no more than 3% based on the number of T cells present in the population at the start of the method. In some embodiments, the number of T cells that are killed during the method is no more than 5% based on the number of T cells present in the population at the start of the method. In some embodiments, the number of T cells that are killed during the method is no more than 10% based on the number of T cells present in the population at the start of the method. In some embodiments, the number of T cells that are killed during the method is no more than 15% based on the number of T cells present in the population at the start of the method. In some embodiments, the method further comprises freezing the population of T cells. In some embodiments, the indels prevent expression of human T-cell receptor alpha-constant, human beta-2 microglobulin, and human class II major histocompatibility complex transactivator.

[0022] Provided herein, in some aspects, is a method of producing an immunologically compatible CAR T cell comprising: a) contacting ex vivo a T cell with a viral vector or viral particle comprising a donor nucleic acid encoding the CAR for a sufficient period of time to allow for viral transduction of the T cell; b) contacting ex vivo the T cell with at least three different ribonucleoprotein (RNP) complexes comprising an effector protein and a guide nucleic acid, wherein the at least three RNP complexes comprise: i. an effector protein and a first guide nucleic acid, wherein the first guide nucleic acid comprises a sequence that is at least 90% identical or complementary to an equal length portion of a target sequence of a gene encoding human T-cell receptor alpha-constant (TRAC gene); ii. an effector protein and a second guide nucleic acid, wherein the second guide nucleic acid comprises a sequence that is at least 90% identical or complementary to an equal length portion of a target sequence of a gene encoding human beta-2 microglobulin (B2M gene); iii. an effector protein and a third guide nucleic acid, wherein the third guide nucleic acid comprises a sequence that is at least 90% identical or complementary to an equal length portion of a target sequence of a gene encoding human class II major histocompatibility complex transactivator (CIITA gene); and c) culturing the T cell for a sufficient period of time for indels to occur in the TRAC gene, B2M gene and CIITA gene and for integration of the donor nucleic acid into the TRAC gene, thereby producing the immunologically compatible CAR T cell.

[0023] In some embodiments, a method provided herein comprises use of a viral vector, a viral particle or a pharmaceutical composition described herein, wherein the viral vector comprises a nucleotide sequence that encodes an effector protein, wherein the effector protein comprises an amino acid sequence described herein. In some embodiments, the effector protein comprises an amino acid sequence that has at least about 85% sequence identity to a sequence selected from the group consisting of SEQ ID NOs: 1-45 or 2435. In some embodiments, the effector protein comprises an amino acid sequence that has at least about 90% sequence identity to a sequence selected from the group consisting of SEQ ID NOs: 1-45 or 2435. In some embodiments, the effector protein comprises an amino acid sequence that has at least about 95% sequence identity to a sequence selected from the group consisting of SEQ ID NOs: 1-45 or 2435. In some embodiments, the effector protein comprises an amino acid sequence that has at least about 98% sequence identity to a sequence selected from the group consisting of SEQ ID NOs: 1-45 or 2435. In some embodiments, the effector protein comprises an amino acid sequence that has at least about 99% sequence identity to a sequence selected from the group consisting of SEQ ID NOs: 1-45 or 2435. In some embodiments, the effector protein comprises an amino acid sequence that is identical to a sequence selected from the group consisting of SEQ ID NOs: 1-45 or 2435. In some embodiments, the effector protein comprises an amino acid sequence that has at least about 85% sequence identity to a sequence selected from the group consisting of SEQ ID NOs: 46-94. In some embodiments, the effector protein comprises an amino acid sequence that has at least about 90% sequence identity to a sequence selected from the group consisting of SEQ ID NOs: 46-94. In some embodiments, the effector protein comprises an amino acid sequence that has at least about 95% sequence identity to a sequence selected from the group consisting of SEQ ID NOs: 46-94. In some embodiments, the effector protein comprises an amino acid sequence that has at least about 98% sequence identity to a sequence selected from the group consisting of SEQ ID NOs: 46-94. In some embodiments, the effector protein comprises an amino acid sequence that has at least about 99% sequence identity to a sequence selected from the group consisting of SEQ ID NOs: 46-94. In some embodiments, the effector protein comprises an amino acid sequence that is identical to a sequence selected from the group consisting of SEQ ID NOs: 46-94. In some embodiments, the effector protein comprises an amino acid sequence that has at least about 85%, at least about 90%, at least about 95%, at least about 98%, at least about 99% sequence identity, or is identical, to a sequence selected from the group consisting of SEQ ID NOs: 95-203.

[0024] In some embodiments, a method provided herein comprises use of a viral vector, a viral particle or a pharmaceutical composition described herein, the viral vector comprises a nucleotide sequence that encodes an effector protein, wherein the effector protein comprises an amino acid sequence of a specified length. In some embodiments, the effector protein comprises an amino acid sequence length that is less than about 600, less than about 500, less than about 450 amino acids, or less than about 400 amino acids. In some embodiments, the effector protein comprises an amino acid sequence length that is at least about 300, at least about 350, at least about 400, or at least about 450 linked amino acids. In some embodiments, the effector protein comprises an amino acid sequence length that is about 300 to about 600 linked amino acids. In some embodiments, the effector protein comprises an amino acid sequence length that is about 400 to about 600 linked amino acids. In some embodiments, the effector protein comprises an amino acid sequence length that is about 450 to about 500 linked amino acids. In some embodiments, the effector protein comprises an amino acid sequence length that is about 420 to about 480 linked amino acids.

[0025] In some embodiments, a method provided herein comprises use of a viral vector, a viral particle or a pharmaceutical composition described herein, wherein the viral vector comprises a nucleotide sequence that, when transcribed and/or cleaved by the effector protein, produces a guide nucleic acid that has one or more features described herein. In some embodiments, the first guide nucleic acid, the second guide nucleic acid, and the third guide nucleic acid are each a guide RNA. In some embodiments, the nucleotide sequence that the effector protein binds is the same for the first guide nucleic acid, the second guide nucleic acid, and the third guide nucleic acid. In some embodiments, the nucleotide sequence that the effector protein binds is different for the first guide nucleic acid, the second guide nucleic acid, and the third guide nucleic acid. In some embodiments, the nucleotide sequences that the effector protein bind for the first guide nucleic acid, the second guide nucleic acid, and the third guide nucleic acid comprise at least about 90%, at least about 95%, at least about 98%, or at least 99% sequence identity to each other. In some embodiments, the first guide nucleic acid, the second guide nucleic acid, and the third guide nucleic acid comprise a tracrRNA sequence. In some embodiments, the tracrRNA sequence comprises the nucleotide sequence of any one of SEQ ID NO: 385-440. In some embodiments, the first guide nucleic acid comprises a sequence that is complementary to an equal length portion of a target sequence of the TRAC gene. In some embodiments, the second guide nucleic acid comprises a sequence that is complementary to an equal length portion of a target sequence of the B2M gene. In some embodiments, wherein the third guide nucleic acid comprises a sequence that is complementary to an equal length portion of a target sequence of the CIITA gene. In some embodiments, the first guide nucleic acid comprises a sequence that is at least 90% identical to an equal length portion of a target sequence of the TRAC gene. In some embodiments, the second guide nucleic acid comprises a sequence that is at least 90% identical to an equal length portion of a target sequence of the B2M gene. In some embodiments, the third guide nucleic acid comprises a sequence that is at least 90% identical to an equal length portion of a target sequence of the CIITA gene. In some embodiments, the first guide nucleic acid comprises the nucleotide sequence of any one of the sequences recited in TABLE 5, TABLE 5.1, TABLE 9, TABLE 9.1, TABLE 10, TABLE 10.1, TABLE 14, and TABLE 14.1. In some embodiments, the second guide nucleic acid comprises the nucleotide sequence of any one of the sequences recited in TABLE 6, TABLE 6.1, TABLE 11, TABLE 11.1, TABLE 12, TABLE 12.1, TABLE 15, and TABLE 15.1. In some embodiments, the third guide nucleic acid comprises the nucleotide sequence of any one of the sequences recited in TABLE 7, TABLE 7.1, TABLE 8, TABLE 13, and TABLE 16.

[0026] In some embodiments, a method provided herein comprises use of a viral vector, a viral particle or a pharmaceutical composition described herein, wherein the viral vector provided herein comprises a fifth nucleotide sequence that comprises a donor nucleic acid, wherein the donor nucleic acid encodes a CAR, and wherein the CAR binds to an antigen expressed by a cancer cell. In some embodiments, the antigen is selected from the group consisting of ADRB3, AKAP-4,ALK, Androgen receptor, B7H3, BCMA, BORIS, BST2, CAIX, CD 179a, CD123, CD171, CD19, CD20, CD22, CD24, CD30, CD300LF, CD33, CD38, CD44v6, CD72, CD79a, CD79b, CD97, CEA, CLDN6, CLEC12A, CLL-1, CS-1, CXORF61, CYP1B1, Cyclin B 1, E7, EGFR, EGFRvIII, ELF2M, EMR2, EPCAM, ERBB2 (Her2/neu), ERG (TMPRSS2 ETS fusion gene), ETV6-AML, EphA2, Ephrin B2, FAP, FCAR, FCRL5, FLT3, Folate receptor alpha, Folate receptor beta, Fos-related antigen 1, Fucosyl GMl, GD2, GD3, GM3, GPC3, GPR20, GPRC5D, GloboH, HAVCR1, HMWMAA, HPV E6, IGF-I receptor, IL-13Ra2, IL-11Ra, KIT, LAGE-1a, LAIR1, LCK, LILRA2, LMP2, LY6K, LY75, LewisY, MAD-CT-1, MAD-CT-2, MAGE A1, MAGE-A1, ML-IAP, MUC1, MYCN, MelanA/MARTl, Mesothelin, NA17, NCAM, NY-BR-1, NY-ESO-1, OR51E2, OY- TES 1, PANX3, PAP, PAX3, PAX5, PCTA-1/Galectin 8, PDGFR-beta, PLAC1, PRSS21, PSCA, PSMA, Polysialic acid, Prostase, RAGE-1, ROR1, RU1, RU2, Ras mutant, RhoC, SART3, SSEA-4, SSX2, TAG72, TARP, TEM1/CD248, TEM7R, TGS5, TRP-2, TSHR, Tie 2, Tn Ag, UPK2, VEGFR2, WT1, XAGE1, and IGLL1.

[0027] In some embodiments, a method provided herein comprises use of a viral vector, a viral particle or a pharmaceutical composition described herein, wherein the viral vector provided herein comprises two inverted terminal repeats of is an AAV. In some embodiments, the method comprises contacting with the viral particle. In some embodiments, the viral particle is a retrovirus, an adenovirus, an arenavirus, an alphavirus, an AAV, a baculovirus, a vaccinia virus, a herpes simplex virus or a poxvirus. In some embodiments, the viral particle is an AAV.

[0028] In some embodiments, a method provided herein comprises contacting ex vivo a T cell with a viral vector or viral particle comprising a donor nucleic acid encoding the CAR for a sufficient period of time to allow for viral transduction of the T cell, wherein the contacting ex vivo comprises at least about 1 hour, at least about 2 hours, at least about 3 hours, at least about 4 hours, at least about 5 hours or at least about 6 hours. In some embodiments, the method comprises using a MOI of viral vector or viral particle to T cell of T cell of about 1×10⁴, about 5×10⁴, about 1×10⁵, about 5×10⁵, about 1×10⁶, about 5×10⁶, about 1×10⁷, about 5×10⁷, about 1×10⁸, about 5×10⁸, about 1×10⁹, about 5×10⁹, about 1×10¹⁰, or about 5×10¹⁰.

[0029] In some embodiments, a method provided herein comprises culturing the T cell for a sufficient period of time for indels to occur in the TRAC gene, B2M gene and CIITA gene and for integration of the donor nucleic acid into the TRAC gene, the culturing is for at least 1 day, at least 2 days, at least 3 days, at least 4 days, at least 5 days, or at least 6 days. In some embodiments, the culturing is for no more than 7 days, no more than 8 days, no more than 9 days, no more than 10 days, no more than 11 days, no more than 12 days, no more than 13 days, no more than 14 days, no more than 15 days, no more than 16 days, no more than 17 days, no more than 18 days, no more than 19 days, no more than 20 days, no more than 21 days.

[0030] In some embodiments, a method provided herein further comprises freezing the T cell. In some embodiments, a method provided herein comprises no other agent that alters the T cell's ability to recognize a target cell or pathogen or autoreactivity of the T cell in a subject. In some embodiments, a method provided herein comprises culturing the T cell for a sufficient period of time for indels to occur in the TRAC gene, B2M gene and CIITA gene and for integration of the donor nucleic acid into the TRAC gene, wherein the indels prevent expression of human T-cell receptor alpha-constant, human beta-2 microglobulin, and human class II major histocompatibility complex transactivator. In some embodiments, a method provided herein comprises contacting ex vivo the T cell with at least three different RNP complexes comprising an effector protein and a guide nucleic acid, wherein contacting ex vivo the T cell with at least three different RNP complexes comprises electroporation, lipofection, or lipid nanoparticle (LNP) delivery of the RNP complexes.

[0031] Provided herein, in some aspects, is a method of producing a population of immunologically compatible CAR T cells comprising: a) contacting ex vivo a population of T cells with a viral vector or viral particle comprising a donor nucleic acid encoding the CAR for a sufficient period of time to allow for viral transduction of T cells contained in the population; b) contacting ex vivo the population of T cells with at least three different RNP complexes comprising an effector protein and a guide nucleic acid, wherein the at least three RNP complexes comprise: i. an effector protein and a first guide nucleic acid, wherein the first guide nucleic acid comprises a sequence that is at least 90% identical or complementary to an equal length portion of a target sequence of a gene encoding human T-cell receptor alpha-constant (TRAC gene); ii. an effector protein and a second guide nucleic acid, wherein the second guide nucleic acid comprises a sequence that is at least 90% identical or complementary to an equal length portion of a target sequence of a gene encoding human beta-2 microglobulin (B2M gene); iii. an effector protein and a third guide nucleic acid, wherein the third guide nucleic acid comprises a sequence that is at least 90% identical or complementary to an equal length portion of a target sequence of a gene encoding human class II major histocompatibility complex transactivator (CIITA gene); and c) culturing the population of T cells for sufficient period of time for indels to occur in the TRAC gene, B2M gene and CIITA gene and for integration of the donor nucleic acid into the TRAC gene in at least 50% of the T cells contained in the population of T cells, thereby producing the population of CAR T cells.

[0032] In some embodiments, a method provided herein comprises use of RNP complexes comprising an effector protein, wherein the effector protein comprises an amino acid sequence described herein. In some embodiments, the effector protein comprises an amino acid sequence that has at least about 85% sequence identity to a sequence selected from the group consisting of SEQ ID NOs: 1-45 or 2435. In some embodiments, the effector protein comprises an amino acid sequence that has at least about 90% sequence identity to a sequence selected from the group consisting of SEQ ID NOs: 1-45 or 2435. In some embodiments, the effector protein comprises an amino acid sequence that has at least about 95% sequence identity to a sequence selected from the group consisting of SEQ ID NOs: 1-45 or 2435. In some embodiments, the effector protein comprises an amino acid sequence that has at least about 98% sequence identity to a sequence selected from the group consisting of SEQ ID NOs: 1-45 or 2435. In some embodiments, the effector protein comprises an amino acid sequence that has at least about 99% sequence identity to a sequence selected from the group consisting of SEQ ID NOs: 1-45 or 2435. In some embodiments, the effector protein comprises an amino acid sequence that is identical to a sequence selected from the group consisting of SEQ ID NOs: 1-45 or 2435. In some embodiments, the effector protein comprises an amino acid sequence that has at least about 85% sequence identity to a sequence selected from the group consisting of SEQ ID NOs: 46-94. In some embodiments, the effector protein comprises an amino acid sequence that has at least about 90% sequence identity to a sequence selected from the group consisting of SEQ ID NOs: 46-94. In some embodiments, the effector protein comprises an amino acid sequence that has at least about 95% sequence identity to a sequence selected from the group consisting of SEQ ID NOs: 46-94. In some embodiments, the effector protein comprises an amino acid sequence that has at least about 98% sequence identity to a sequence selected from the group consisting of SEQ ID NOs: 46-94. In some embodiments, the effector protein comprises an amino acid sequence that has at least about 99% sequence identity to a sequence selected from the group consisting of SEQ ID NOs: 46-94. In some embodiments, the effector protein comprises an amino acid sequence that is identical to a sequence selected from the group consisting of SEQ ID NOs: 46-94. In some embodiments, the effector protein comprises an amino acid sequence that has at least about 85%, at least about 90%, at least about 95%, at least about 98%, at least about 99% sequence identity, or is identical, to a sequence selected from the group consisting of SEQ ID NOs: 95-203.

[0033] In some embodiments, a method provided herein comprises use of RNP complexes comprising an effector protein, wherein the effector protein comprises an amino acid sequence of a specified length. In some embodiments, the effector protein comprises an amino acid sequence length that is less than about 600, less than about 500, less than about 450 amino acids, or less than about 400 amino acids. In some embodiments, the effector protein comprises an amino acid sequence length that is at least about 300, at least about 350, at least about 400, or at least about 450 linked amino acids. In some embodiments, the effector protein comprises an amino acid sequence length that is about 300 to about 600 linked amino acids. In some embodiments, the effector protein comprises an amino acid sequence length that is about 400 to about 600 linked amino acids. In some embodiments, the effector protein comprises an amino acid sequence length that is about 450 to about 500 linked amino acids. In some embodiments, the effector protein comprises an amino acid sequence length that is about 420 to about 480 linked amino acids.

[0034] In some embodiments, a method provided herein comprises use of RNP complexes comprising a guide nucleic acid having one or more features described herein. In some embodiments, the first guide nucleic acid, the second guide nucleic acid, and the third guide nucleic acid are each a guide RNA. In some embodiments, the nucleotide sequence that the effector protein binds is the same for the first guide nucleic acid, the second guide nucleic acid, and the third guide nucleic acid. In some embodiments, the nucleotide sequence that the effector protein binds is different for the first guide nucleic acid, the second guide nucleic acid, and the third guide nucleic acid. In some embodiments, the nucleotide sequences that the effector protein bind for the first guide nucleic acid, the second guide nucleic acid, and the third guide nucleic acid comprise at least about 90%, at least about 95%, at least about 98%, or at least 99% sequence identity to each other. In some embodiments, the first guide nucleic acid, the second guide nucleic acid, and the third guide nucleic acid comprise a tracrRNA sequence. In some embodiments, the tracrRNA sequence comprises the nucleotide sequence of any one of SEQ ID NO: 385-440. In some embodiments, the first guide nucleic acid comprises a sequence that is complementary to an equal length portion of a target sequence of the TRAC gene. In some embodiments, the second guide nucleic acid comprises a sequence that is complementary to an equal length portion of a target sequence of the B2M gene. In some embodiments, the third guide nucleic acid comprises a sequence that is complementary to an equal length portion of a target sequence of the CIITA gene. In some embodiments, the first guide nucleic acid comprises a sequence that is at least 90% identical to an equal length portion of a target sequence of the TRAC gene. In some embodiments, the second guide nucleic acid comprises a sequence that is at least 90% identical to an equal length portion of a target sequence of the B2M gene. In some embodiments, the third guide nucleic acid comprises a sequence that is at least 90% identical to an equal length portion of a target sequence of the CIITA gene. In some embodiments, the first guide nucleic acid comprises the nucleotide sequence of any one of the sequences recited in TABLE 5, TABLE 5.1, TABLE 9, TABLE 9.1, TABLE 10, TABLE 10.1, TABLE 14, and TABLE 14.1. In some embodiments, the second guide nucleic acid comprises the nucleotide sequence of any one of the sequences recited in TABLE 6, TABLE 6.1, TABLE 11, TABLE 11.1, TABLE 12, TABLE 12.1, TABLE 15, and TABLE 15.1. In some embodiments, the third guide nucleic acid comprises the nucleotide sequence of any one of the sequences recited in TABLE 7, TABLE 7.1, TABLE 8, TABLE 13, and TABLE 16.

[0035] In some embodiments, a method provided herein comprises use of a viral vector or a viral particle comprising a donor nucleic acid, wherein the donor nucleic acid encodes a CAR, and wherein the CAR binds to an antigen expressed by a cancer cell. In some embodiments, the antigen is selected from the group consisting of ADRB3, AKAP-4,ALK, Androgen receptor, B7H3, BCMA, BORIS, BST2, CAIX, CD 179a, CD123, CD171, CD19, CD20, CD22, CD24, CD30, CD300LF, CD33, CD38, CD44v6, CD72, CD79a, CD79b, CD97, CEA, CLDN6, CLEC12A, CLL-1, CS-1, CXORF61, CYP1B1, Cyclin B 1, E7, EGFR, EGFRvIII, ELF2M, EMR2, EPCAM, ERBB2 (Her2/neu), ERG (TMPRSS2 ETS fusion gene), ETV6-AML, EphA2, Ephrin B2, FAP, FCAR, FCRL5, FLT3, Folate receptor alpha, Folate receptor beta, Fos-related antigen 1, Fucosyl GMl, GD2, GD3, GM3, GPC3, GPR20, GPRC5D, GloboH, HAVCR1, HMWMAA, HPV E6, IGF-I receptor, IL-13Ra2, IL-11Ra, KIT, LAGE-1a, LAIR1, LCK, LILRA2, LMP2, LY6K, LY75, LewisY, MAD-CT-1, MAD-CT-2, MAGE A1, MAGE-A1, ML-IAP, MUC1, MYCN, MelanA/MARTl, Mesothelin, NA17, NCAM, NY-BR-1, NY-ESO-1, OR51E2, OY- TES 1, PANX3, PAP, PAX3, PAX5, PCTA-1/Galectin 8, PDGFR-beta, PLAC1, PRSS21, PSCA, PSMA, Polysialic acid, Prostase, RAGE-1, ROR1, RU1, RU2, Ras mutant, RhoC, SART3, SSEA-4, SSX2, TAG72, TARP, TEM1/CD248, TEM7R, TGS5, TRP-2, TSHR, Tie 2, Tn Ag, UPK2, VEGFR2, WT1, XAGE1, and IGLL1.

[0036] In some embodiments, a method provided herein comprises use of a viral vector or a viral particle described herein, wherein viral vector comprises two inverted terminal repeats of an AAV. In some embodiments, the method comprises contacting with the viral particle. In some embodiments, the viral particle is a retrovirus, an adenovirus, an arenavirus, an alphavirus, an AAV, a baculovirus, a vaccinia virus, a herpes simplex virus or a poxvirus. In some embodiments, the viral particle is an AAV.

[0037] In some embodiments, a method provided herein comprises contacting ex vivo a population of T cells with a viral vector or viral particle comprising a donor nucleic acid encoding the CAR for a sufficient period of time to allow for viral transduction of the T cell, wherein the contacting ex vivo comprises at least about 1 hour, at least about 2 hours, at least about 3 hours, at least about 4 hours, at least about 5 hours or at least about 6 hours. In some embodiments, the method comprises a MOI of viral vector or viral particle to T cell of about 1×10⁴, about 5×10⁴, about 1×10⁴, about 5×10⁴, about 1×10⁶, about 5×10⁶, about 1×10⁷, about 5×10⁷, about 1×10⁸, about 5×10⁸, about 1×10⁹, about 5×10⁹, about 1×10¹⁰, or about 5×10¹⁰.

[0038] In some embodiments, a method provided herein comprises culturing a population of T cells for sufficient period of time for indels to occur in the TRAC gene, B2M gene and CIITA gene and for integration of the donor nucleic acid into the TRAC gene in at least 50% of the T cells contained in the population of T cells, wherein the culturing is for at least 1 day, at least 2 days, at least 3 days, at least 4 days, at least 5 days, or at least 6 days. In some embodiments, the culturing is for no more than 7 days, no more than 8 days, no more than 9 days, no more than 10 days, no more than 11 days, no more than 12 days, no more than 13 days, no more than 14 days, no more than 15 days, no more than 16 days, no more than 17 days, no more than 18 days, no more than 19 days, no more than 20 days, no more than 21 days. In some embodiment, the period of time is sufficient for at least 55% of the T cells contained in the population to have indels occur in the TRAC gene, B2M gene and CIITA gene and integration of the donor nucleic acid. In some embodiment, the period of time is sufficient for at least 60% of the T cells contained in the population to have indels occur in the TRAC gene, B2M gene and CIITA gene and integration of the donor nucleic acid. In some embodiment, the period of time is sufficient for at least 65% of the T cells contained in the population to have indels occur in the TRAC gene, B2M gene and CIITA gene and integration of the donor nucleic acid. In some embodiment, the period of time is sufficient for at least 75% of the T cells contained in the population to have indels occur in the TRAC gene, B2M gene and CIITA gene and integration of the donor nucleic acid. In some embodiment, the period of time is sufficient for at least 80% of the T cells contained in the population to have indels occur in the TRAC gene, B2M gene and CIITA gene and integration of the donor nucleic acid.

[0039] In some embodiments, the method of producing a population of immunologically compatible CAR T cells provided herein comprises no other agent that alters the T cells′, contained in the population, ability to recognize a target cell or pathogen or autoreactivity of the T cells contained in the population in a subject. In some embodiments, the method comprises contacting ex vivo the population of T cells with at least three different RNP complexes comprises electroporation, lipofection, or lipid nanoparticle (LNP) delivery of the RNP complexes. In some embodiments, the method further comprises freezing the population of T cells. In some embodiments, the method comprises culturing the population of T cells for sufficient period of time for indels to occur in the TRAC gene, B2M gene and CIITA gene and for integration of the donor nucleic acid into the TRAC gene in at least 50% of the T cells contained in the population of T cells, wherein the indels prevent expression of human T-cell receptor alpha-constant, human beta-2 microglobulin, and human class II major histocompatibility complex transactivator. In some embodiments, the number of T cells that are killed during the method is no more than 1% based on the number of T cells present in the population at the start of the method. In some embodiments, the number of T cells that are killed during the method is 3% based on the number of T cells present in the population at the start of the method. In some embodiments, the number of T cells that are killed during the method is 5% based on the number of T cells present in the population at the start of the method. In some embodiments, the number of T cells that are killed during the method is 10% based on the number of T cells present in the population at the start of the method. In some embodiments, the number of T cells that are killed during the method is 15% based on the number of T cells present in the population at the start of the method.

[0040] Provided herein, in some aspects, is an immunologically compatible CAR T cell made by a method described herein.

[0041] Provided herein, in some aspects, is a population of immunologically compatible CAR T cells made by a method described herein.

[0042] Provided herein, in some aspects, is an immunologically compatible CART cell comprising: a) indels in each of a human T-cell receptor alpha-constant (TRAC gene), human beta-2 microglobulin (B2M gene), and human class II major histocompatibility complex transactivator (CIITA gene), wherein each of the indels is within proximity of a protospacer adjacent motif (PAM) sequence of an effector protein; and b) integration of a donor nucleic acid encoding a CAR into the TRAC gene. In some embodiments, the PAM sequence comprises 5′-CTT-3′, 5′-CC-3′, 5′-TCG-3′, 5′-GCG-3′, 5′-TTG-3′, 5′-GTG-3′, 5′-ATTA-3′, 5′-ATTG-3′, 5′-GTTA-3′, 5′-GTTG-3′, 5′-TC-3′, 5′-ACTG-3′, 5′-GCTG-3′, 5′-TTC-3′, or 5′-TTT-3′. In some embodiments, the PAM sequence comprises 5′-TBN-3′, wherein B is one or more of C, G, or T and N is any nucleotide. In some embodiments, the PAM sequence comprises 5′-TTTN-3′. In some embodiments, PAM sequence comprises 5′-GTTK-3′, 5′-VTTK-3′, 5′-VTTS-3′, 5′-TTTS-3′ or 5′-VTTN-3′, wherein K is G or T, V is A, C or G, S is C or G, and N is any nucleotide. In some embodiments, the indels are within 10 nucleotides of the PAM sequence. In some embodiments, the indels are within 15 nucleotides of the PAM sequence. In some embodiments, the indels are within 20 nucleotides of the PAM sequence. In some embodiments, the indels are within 25 nucleotides of the PAM sequence. In some embodiments, the indels are within 30 nucleotides of the PAM sequence. In some embodiments, the CAR T cell is a cytotoxic T cell or a helper T cell. In some embodiments, expression of the donor nucleic acid is driven by an endogenous TRAC gene promotor of the T cell.

[0043] Provided herein, in some aspects, is a population of T cells comprising an immunologically compatible CART cell described herein. In some embodiments, at least 50% of the T cells contained in the population are an immunologically compatible CAR T cell described herein. In some embodiments, at least 55% of the T cells contained in the population are an immunologically compatible CAR T cell described herein. In some embodiments, at least 60% of the T cells contained in the population are an immunologically compatible CAR T cell described herein. In some embodiments, at least 65% of the T cells contained in the population are an immunologically compatible CAR T cell described herein. In some embodiments, at least 70% of the T cells contained in the population are an immunologically compatible CAR T cell described herein. In some embodiments, at least 75% of the T cells contained in the population are an immunologically compatible CAR T cell described herein. In some embodiments, at least 80% of the T cells contained in the population are an immunologically compatible CAR T cell described herein. In some embodiments, the CAR T cell is a cytotoxic T cell or a helper T cell.

[0044] Provided herein, in some aspects, is a kit for making an immunologically compatible CAR T cell comprising: a) a viral vector described herein or a viral particle described herein; and b) one or more reagents for transducing a T cell. In some embodiments, the kit further comprises one or more containers comprising the viral vector and the one or more reagents. In some embodiments, the kit further comprises a package, carrier, or container that is compartmentalized to receive the one or more containers.

[0045] Provided herein, in some aspects, is a system comprising a T cell and a viral vector described or a viral particle described herein.

[0046] Provided herein, in some aspects, is a method for killing a cell or pathogen in a subject comprising administering an effective amount of an immunologically compatible CAR T cell described herein or a population of immunologically compatible CAR T cells described herein to the subject.

[0047] Provided herein, in some aspects, is method for killing a cell or pathogen in a subject comprising: a) obtaining T cells from a first subject; b) performing a method described herein; and c) administering an effective amount of the immunologically compatible CAR T cells back to the first subject or to a second subject. In some embodiments, obtaining the T cells and administering an effective amount of the immunologically compatible CAR T cells is for a period of time that is no more than 21 days. In some embodiments, obtaining the T cells and administering an effective amount of the immunologically compatible CAR T cells is for a period of time that is no more than 20 days. In some embodiments, obtaining the T cells and administering an effective amount of the immunologically compatible CAR T cells is for a period of time that is no more than 19 days. In some embodiments, obtaining the T cells and administering an effective amount of the immunologically compatible CAR T cells is for a period of time that is no more than 18 days. In some embodiments, obtaining the T cells and administering an effective amount of the immunologically compatible CAR T cells is for a period of time that is no more than 17 days. In some embodiments, obtaining the T cells and administering an effective amount of the immunologically compatible CAR T cells is no more than 16 days. In some embodiments, obtaining the T cells and administering an effective amount of the immunologically compatible CAR T cells is for a period of time that is no more than 15 days. In some embodiments, obtaining the T cells and administering an effective amount of the immunologically compatible CAR T cells is for a period of time that is no more than 14 days. In some embodiments, obtaining the T cells and administering an effective amount of the immunologically compatible CAR T cells is for a period of time that is no more than 13 days. In some embodiments, obtaining the T cells and administering an effective amount of the immunologically compatible CAR T cells is for a period of time that is no more than 12 days. In some embodiments, obtaining the T cells and administering an effective amount of the immunologically compatible CAR T cells is for a period of time that is no more than 11 days. In some embodiments, obtaining the T cells and administering an effective amount of the immunologically compatible CAR T cells is for a period of time that is no more than 10 days. In some embodiments, obtaining the T cells and administering an effective amount of the immunologically compatible CAR T cells is for a period of time that is no more than 9 days. In some embodiments, obtaining the T cells and administering an effective amount of the immunologically compatible CAR T cells is for a period of time that is no more than 8 days. In some embodiments, obtaining the T cells and administering an effective amount of the immunologically compatible CAR T cells is for a period of time that is no more than 7 days. In some embodiments, obtaining the T cells and administering an effective amount of the immunologically compatible CAR T cells is for a period of time that is no more than 6 days. In some embodiments, the T cells obtained from the first subject is a naïve T cell. In some embodiments, the CAR T cell administered to the first or second subject is a cytotoxic T cell or a helper T cell.

[0048] Provided herein, in some aspects, is a method of reducing tumor size in a subject comprising administering an effective amount of an CAR T cell described herein or a population of CAR T cells described herein to the subject.

[0049] Provided herein, in some aspects, is a method of reducing tumor size in a subject comprising: a) obtaining T cells from a first subject; b) performing a method described herein; and c) administering an effective amount of the immunologically compatible CAR T cells back to the first subject or a second subject. In some embodiments, obtaining the T cells and administering an effective amount of the immunologically compatible CAR T cells is for a period of time that is no more than 21 days. In some embodiments, obtaining the T cells and administering an effective amount of the immunologically compatible CAR T cells is for a period of time that is no more than 20 days. In some embodiments, obtaining the T cells and administering an effective amount of the immunologically compatible CAR T cells is for a period of time that is no more than 19 days. In some embodiments, obtaining the T cells and administering an effective amount of the immunologically compatible CAR T cells is for a period of time that is no more than 18 days. In some embodiments, obtaining the T cells and administering an effective amount of the immunologically compatible CAR T cells is for a period of time that is no more than 17 days. In some embodiments, obtaining the T cells and administering an effective amount of the immunologically compatible CAR T cells is for a period of time that is no more than 16 days. In some embodiments, obtaining the T cells and administering an effective amount of the immunologically compatible CAR T cells is for a period of time that is no more than 15 days. In some embodiments, obtaining the T cells and administering an effective amount of the immunologically compatible CAR T cells is for a period of time that is no more than 14 days. In some embodiments, obtaining the T cells and administering an effective amount of the immunologically compatible CAR T cells is for a period of time that is no more than 13 days. In some embodiments, obtaining the T cells and administering an effective amount of the immunologically compatible CAR T cells is for a period of time that is no more than 12 days. In some embodiments, obtaining the T cells and administering an effective amount of the immunologically compatible CAR T cells is for a period of time that is no more than 11 days. In some embodiments, obtaining the T cells and administering an effective amount of the immunologically compatible CAR T cells is for a period of time that is no more than 10 days. In some embodiments, obtaining the T cells and administering an effective amount of the immunologically compatible CAR T cells is for a period of time that is no more than 9 days. In some embodiments, obtaining the T cells and administering an effective amount of the immunologically compatible CAR T cells is for a period of time that is no more than 8 days. In some embodiments, obtaining the T cells and administering an effective amount of the immunologically compatible CAR T cells is for a period of time that is no more than 7 days. In some embodiments, obtaining the T cells and administering an effective amount of the immunologically compatible CAR T cells is for a period of time that is no more than 6 days. In some embodiments, the T cells obtained from the first subject is a naïve T cell. In some embodiments, the CAR T cell administered to the first or second subject is a cytotoxic T cell or a helper T cell.

[0050] Also provided herein are viral vectors comprising: a first nucleotide sequence that encodes an effector protein; and a second nucleotide sequence that, when transcribed and/or cleaved by the effector protein, produces a guide nucleic acid. In some embodiments, the guide nucleic acid comprises a sequence that is at least 90% identical or complementary to an equal length portion of a target sequence of a gene encoding human T-cell receptor alpha-constant (TRAC gene). In some embodiments, the guide nucleic acid comprises a nucleotide sequence that the effector protein binds. In some embodiments, the effector protein comprises a sequence with at least about: 90%, 95%, 96%, 97%, 98%, or 99% sequence homology to SEQ ID NO: 2435. In some embodiments, the effector protein comprises the amino acid sequence of SEQ ID NO: 2435. In some embodiments, the guide nucleic acid comprises a sequence with at least about: 90%, 95%, 96%, 97%, 98%, or 99% sequence identity to any one of the sequences recited in TABLE 5, TABLE 5.1, TABLE 9, TABLE 9.1, TABLE 10, TABLE 10.1, TABLE 14, and TABLE 14.1. In some embodiments, the guide nucleic acid comprises any one of the sequences recited in TABLE 5, TABLE 5.1, TABLE 9, TABLE 9.1, TABLE 10, TABLE 10.1, TABLE 14, and TABLE 14.1. In some embodiments, the viral vector is an scAAV vector. In some embodiments, the viral vector is an ssAAV vector. Also provided herein are T-cells comprising the viral vector. In some embodiments, the T-cells comprise cytotoxic T cells or helper T cells.

[0051] Also provided herein are viral vectors comprising: a first nucleotide sequence that encodes an effector protein; and a second nucleotide sequence that, when transcribed and/or cleaved by the effector protein, produces a guide nucleic acid. In some embodiments, the guide nucleic acid comprises a sequence that is at least 90% identical or complementary to an equal length portion of a target sequence of a gene encoding human beta-2 microglobulin (B2M gene). In some embodiments, the guide nucleic acid comprises a nucleotide sequence that the effector protein binds. In some embodiments, the effector protein comprises a sequence with at least about: 90%, 95%, 96%, 97%, 98%, or 99% sequence homology to SEQ ID NO: 2435. In some embodiments, the effector protein comprises the amino acid sequence of SEQ ID NO: 2435. In some embodiments, the guide nucleic acid comprises a sequence with at least about: 90%, 95%, 96%, 97%, 98%, or 99% sequence identity to any one of the sequences recited in TABLE 6, TABLE 6.1, TABLE 11, TABLE 11.1, TABLE 12, TABLE 12.1, TABLE 15, and TABLE 15.1. In some embodiments, the guide nucleic acid comprises any one of the sequences recited in TABLE 6, TABLE 6.1, TABLE 11, TABLE 11.1, TABLE 12, TABLE 12.1, TABLE 15, and TABLE 15.1. In some embodiments, the viral vector is an scAAV vector. In some embodiments, the viral vector is an ssAAV vector. Also provided herein are T-cells comprising the viral vector. In some embodiments, the T-cells comprise cytotoxic T cells or helper T cells.

[0052] Also provided herein are viral vectors comprising: a first nucleotide sequence that encodes an effector protein; and a second nucleotide sequence that, when transcribed and/or cleaved by the effector protein, produces a guide nucleic acid. In some embodiments, the guide nucleic acid comprises a sequence that is at least 90% identical or complementary to an equal length portion of a target sequence of a gene encoding human class II major histocompatibility complex transactivator (CIITA gene). In some embodiments, the guide nucleic acid comprises a nucleotide sequence that the effector protein binds. In some embodiments, the effector protein comprises a sequence with at least about: 90%, 95%, 96%, 97%, 98%, or 99% sequence homology to SEQ ID NO: 2435. In some embodiments, the effector protein comprises the amino acid sequence of SEQ ID NO: 2435. In some embodiments, the guide nucleic acid comprises a sequence with at least about: 90%, 95%, 96%, 97%, 98%, or 99% sequence identity to anyone of the sequences recited in TABLE 7, TABLE 7.1, TABLE 8, TABLE 13, and TABLE 16. In some embodiments, the guide nucleic acid comprises any one of the sequences recited in TABLE 7, TABLE 7.1, TABLE 8, TABLE 13, and TABLE 16. In some embodiments, the viral vector is an scAAV vector. In some embodiments, the viral vector is an ssAAV vector. Also provided herein are T-cells comprising the viral vector. In some embodiments, the T-cells comprise cytotoxic T cells or helper T cells.

[0053] Also provided herein are methods of producing a population of immunologically compatible chimeric antigen receptor (CAR) T cells comprising: contacting ex vivo a population of T cells with a viral vector described herein, for a sufficient period of time to allow for viral transduction of T cells contained in the population; and culturing the population of T cells for sufficient period of time for indels to occur in the TRAC gene, the B2M gene or the CIITA gene, thereby producing the population of immunologically compatible CAR T cells.

### BRIEF DESCRIPTION OF THE DRAWINGS

[0054] FIG. 1 shows exemplary AAV vectors encoding small Cas effectors compared to an AAV vector encoding a Cas9 protein.

[0055] FIG. 2 shows the frequency of indel mutations generated in the PCSK9 gene in Hepal-6 cells with AAV vector encoding CasΦ.12 and a guide RNA.

[0056] FIG. 3 shows that a plasmid encoding a guide RNA and a Cas effector protein having a length of between 400 and 500 amino acids can edit the genome of mammalian cells.

[0057] FIG. 4 shows that a plasmid encoding a guide RNA and a Cas effector protein having a length of between 400 and 500 amino acids can edit the genome of mammalian cells at multiple doses.

[0058] FIGS. 5A-5D illustrate the PAM requirement of CasΦ polypeptides. FIG. 5A shows the PAM requirement of CasΦ.2, CasΦ.4, CasΦ.11 and CasΦ.12. FIG. 5B shows the PAM requirement of CasΦ.20, CasΦ.26, CasΦ.32, CasΦ.38 and CasΦ.45. FIG. 5C shows the cleavage products from the assessment of the PAM requirement for CasΦ.20, CasΦ.24 and CasΦ.25. FIG. 5D shows the quantification of the raw data shown in FIG. 5C.

[0059] FIGS. 6A-6F illustrate endogenous gene editing in primary cells. FIG. 6A shows a flow cytometry analysis of T cells that have received CasΦ.12 with or without a gRNA targeting the beta-2 microglobulin gene. FIG. 6B shows the modification detected in K562 cells and T cells following delivery of CasΦ.12 and a gRNA targeting the beta-2 microglobulin gene. FIG. 6C shows the sequence analysis of the T cell population which received CasΦ.12 and the gRNA targeting the beta-2 microglobulin gene. FIG. 6D shows a flow cytometry analysis of T cells that have received CasΦ.12 with a gRNA targeting the T Cell Receptor Alpha Constant gene. FIG. 6E shows the sequence analysis of cell populations that received CasΦ.12 with a gRNA targeting the T Cell Receptor Alpha Constant gene. FIG. 6F shows the quantification of indels detected by sequence analysis.

[0060] FIGS. 7A-7B illustrate the CasΦ.12-mediated efficiency is comparable to that of Cas9. FIG. 7A shows the frequency of indel mutations and quantification of B2M knockout cells from flow cytometry panels in FIG. 7B.

[0061] FIGS. 8A-8E illustrate the ability of CasΦ.12 to target B2M and TRAC genes. FIG. 8A shows the percentage of B2M and TRAC knockout after CasΦ.12-mediated genome editing with gRNAs with a repeat length of 20 nucleotides and a spacer length of 20 nucleotides. FIG. 8B shows the percentage of B2M and TRAC knockout after CasΦ.12-mediated genome editing with gRNAs with a repeat length of 20 nucleotides and a spacer length of 17 nucleotides. FIG. 8C shows corresponding flow cytometry panels for B2M and TRAC knockout with different gRNAs. FIG. 8D shows the percentage of TRAC knockout after CasΦ.12-mediated genome editing with modified gRNAs of different spacer lengths (repeat length of 20 nucleotides and a spacer length of 17 or 20 nucleotides). FIG. 8E shows a corresponding flow cytometry panel for TRAC knockout after CasΦ.12-mediated genome editing.

[0062] FIGS. 9A-9E illustrate exemplary gRNAs for targeting TRAC, B2M and PD1 with CasΦ.12 in human primary T cells.

[0063] FIG. 9F shows the screening of gRNAs targeting TRAC.

[0064] FIG. 9H shows the screening of gRNAs targeting B2M.

[0065] FIGS. 9G and 9I show flow cytometry panels of exemplary gRNAs targeting TRAC and B2M, respectively.

[0066] FIGS. 10A-10J illustrate delivery of CasΦ.12 RNPs or CasΦ.12 mRNA both lead to efficient genome editing of B2M and TRAC in T cells as compared to Cas9. FIG. 10A and FIG. 10B show flow cytometry panels of CasΦ.12 RNP complexes targeting B2M and TRAC in T cells, and are quantified in FIG. 10C and FIG. 10D. FIG. 10E and FIG. 10F show the quantification of indels detected by sequence analysis with delivery of CasΦ.12 RNPs. FIG. 10G and FIG. 10I show the frequency of indel mutations after delivery of CasΦ.12 mRNA as compared to Cas9. FIG. 10H shows an exemplary FACS panel for two data points in FIG. 10G used to quantify B2M knockout cells. FIG. 10J shows the distribution of the size of indel mutations induced by CasΦ.12 or Cas9. No indel is denoted at “0” on the indel size.

[0067] FIG. 11 illustrates the ability of CasΦ RNP complexes to knockout multiple genes simultaneously. T cells were nucleofected with RNP complexes of CasΦ.12 and gRNAs targeting B2M, TRAC or PDCD1 and the percentage knockout was measured using flow cytometry.

[0068] FIGS. 12A-12G illustrate the ability of a CasΦ.12 all-in-one vector to mediate genome editing in Hepal-6 mouse hepatoma cells. FIG. 12A shows a plasmid map of the AAV encoding the CasΦ polypeptide sequence and gRNA sequence. FIG. 12B illustrates repeat truncations. FIG. 12C shows various truncated repeat sequences (25 nt, 20 nt and 19 nt), the data of which shown in FIGS. 12D-12G. FIG. 12D shows efficient transfection with AAV. FIG. 12E shows the frequency of CasΦ.12 induced indel mutations. FIG. 12F and FIG. 12G show the frequency of CasΦ.12 induced indel mutations with different gRNA containing repeat and spacer sequences of different lengths.

[0069] FIG. 13 illustrates the optimization of LNP delivery of mRNA encoding CasΦ and gRNA. A range of N/P ratios were tested and the frequency of indel mutations was determined.

[0070] FIG. 14 illustrates CasΦ-mediated genome editing of the CIITA locus in K562 cells. Cells were nucleofected with RNP complexes (CasΦ polypeptides and gRNAs targeting CIITA) and the frequency of indel mutations was determined by NGS.

[0071] FIG. 15 illustrates PAM preferences for different effector proteins disclosed herein. Frequency of nucleotides at each PAM position was independently calculated using a position frequency matrix (PFM) and plotted as a WebLogo. The number at the top of the plot corresponds to the composition number of TABLE 3 and TABLE 4, denoting the effector protein used, as well as the combination of crRNA, sgRNA, and/or tracrRNA sequence.

[0072] FIG. 16 shows exemplary dose dependent cytotoxicity of CD19-CAR T cells to CD19+ NALM6 cells. Ratio of Effector Cells:Target Cells assayed included 1:1 and 5:1. Controls include GFP and T cell only.

[0073] FIG. 17 shows exemplary dose dependent cytotoxicity of CD19-CAR T cells to CD19+ NALM6 cells. Ratio of Effector Cells:Target Cells assayed included 0.5:1, 1:1, and 5:1. Control is T cell only.

[0074] FIG. 18 show FACS results of B2M editing in primary T cells at day 3 post electroporation for the percent of B2M negative cells with different amounts of Cas 265466 and different amounts of guide constructs.

[0075] FIG. 19 shows editing of TRAC in primary T cells with different amounts of Cas 265466 and different amounts of guide constructs. The graph shows sequencing results at day 3 post electroporation of the percent indels in TRAC in primary T cells treated with different amounts of Cas 265466 and different amounts of guide constructs.

[0076] FIG. 20 shows editing of CIITA in primary T cells with different amounts of Cas 265466 and different amounts of guide constructs. The graph shows sequencing results at day 3 post electroporation of the percent indels in CIITA in primary T cells treated with different amounts of Cas 265466 and different amounts of guide constructs.

[0077] FIG. 21 shows editing of B2M in primary NK cells with Cas 265466 and different guide constructs. The graph shows sequencing results at day 3 post electroporation of the percent indels in B2M in primary NK cells treated with Cas 265466 and different guide constructs. Different electroporation conditions were tested to identify conditions for NK cell electroporation.

[0078] FIG. 22 shows editing of B2M in primary T cells with Cas 265466 and a guide construct in an scAAV vector. The graph shows sequencing results post transduction of the percent indels in B2M in primary T cells treated with Cas 265466 and a guide construct.

[0079] FIG. 23 shows exemplary schematics of scAAV construct for gene editing according to one or more embodiments of the present disclosure. Included in FIG. 23 are the following abbreviations representing elements of the AAV construct: gRNA=guide RNA; P1=first promoter; P2=second promoter; Cas=effector protein.

[0080] FIG. 24 shows the frequency of indel mutations generated in primary T cells with AAV vector encoding Cas19952 and a guide RNA at a ranging from 5e+02 to 5e+05.

[0081] FIGS. 25A-25B illustrates results of CasΦ.12 L26R mediated CD19 integration in T cells. FIG. 25A shows FACS analysis of T cells treated with an RNP complex of CasΦ.12 L26R effector protein and a guide RNA having a sequence of SEQ ID NO: 2593, wherein treated T cells were incubated with CD3 antibody to identify the portion of the treated T cells that have the TRAC gene knocked out. Absence of CD3 protein on surface of the treated T cells indicates successful knock out of the TRAC gene. FIG. 25B shows FACS analysis of T cells treated with the RNP complex and AAV6 particles containing a donor nucleotide sequence encoding a GFP marker. GFP expression indicates successfully GFP marker integration into a TRAC gene locus.

[0082] FIG. 26 illustrates results of % indel generated by CasΦ.12 L26R effector proteins.

[0083] FIGS. 27A-27B illustrates results of CasΦ.12 L26R mediated CD19 integration in T cells. FIG. 27A shows FACS analysis of T cells treated with an RNP complex of CasΦ.12 L26R effector protein and a guide RNA having a sequence of SEQ ID NO: 2593, wherein treated T cells were incubated with CD3 antibody to identify the portion of the treated T cells that have the TRAC gene knocked out. Absence of CD3 protein on surface of the treated T cells indicates successful knock out of the TRAC gene. FIG. 27B shows FACS analysis of T cells treated with the RNP complex and AAV6 particles containing a donor nucleotide sequence encoding CD19 CAR protein, wherein treated T cells were incubated with CD19 antibody to identify portion of the treated T cells that have successfully knocked in CD19. Presence of CD19 protein on surface of the treated T cells indicates successful knock in of CD19 into TRAC locus.

[0084] FIG. 28 illustrates results of an RNP of CasΦ.12 effector protein and a guide RNA mediated single-stranded oligodeoxynucleotides (ssODNs) integration into B2M locus and TRAC locus. For negative control, naïve T cells were treated with ssODN only.

[0085] FIG. 29 shows a schematic illustration of a study design for determining effector protein mediated GFP integration by HDR pathway in T cells.

[0086] FIGS. 30A-30F show comparisons of GFP integration into TRAC locus of T cells, wherein an effector protein was delivered to the T cells by an RNP comprising the effector protein or an mRNA encoding the effector protein. FIGS. 30A and 30D show the portion of T cells that were not expressing CD3 protein post-treatment with the RNP comprising the effector protein or the mRNA encoding the effector protein, respectively, wherein the T cells were incubated with an antibody recognizing CD3 protein. Absence of CD3 protein on T cell surface indicates that TRAC gene is successfully knocked out. FIGS. 30B and 30E show the portion of T cells that were expressing GFP protein post-treatment with the RNP comprising the effector protein or the mRNA encoding the effector protein, respectively, wherein treated cells were further transduced with AAV6 particles comprising a donor nucleotide sequence encoding the EGFP-CAR. GFP expression indicates successful integration of the donor nucleotide sequence. FIGS. 30C and 30F shows negative controls, wherein naïve T cells were treated only the AAV6 particles.

[0087] FIGS. 31A-31B shows FACS analysis 6 days post-transfection. FIG. 31A shows alternate representation of the data shown in FIGS. 30A and 30D, wherein the data illustrates the portion of T cells that do not express CD3 protein on their surface. Absence of CD3 protein on T cell surface indicates that TRAC gene is successfully knocked out. FIG. 31B shows alternate representation of the data shown in FIGS. 30B and 30E, wherein the data illustrates the portion of T cells that expresses GFP protein, which indicates successful integration of the donor nucleotide sequence encoding the EGFP-CAR. In FIGS. 31A-31B, “NT” refers to negative control data shown in FIGS. 30C and 30F, wherein naïve T cells were treated with the AAV6 particles only.

[0088] FIG. 32 shows a schematic illustration of a study design for determining effector protein mediated of promoter-less CD19-CAR into TRAC locus of T cells.

[0089] FIG. 33 shows a combined data for TRAC gene knock-out and GFP knock-in. Specifically, the portion of treated T cells that have GFP protein present, but no CD3 expression, are shown in top left corner (Q5). The portion of treated T cells that do not express either of the GFP protein and CD3 protein are shown in bottom left corner (Q8). The portion of treated T cells that expresses the CD3 protein but do not express the GFP protein are shown in bottom right corner (Q7). The portion of treated T cells that expresses both, the CD3 protein and the GFP protein, are shown in top right corner (Q6).

[0090] FIG. 34 shows exemplary results of a NALM6 cell killing assay. Specifically, the results show a portion of NALM6 cells (10,000 cells) that were killed when incubated with T cells knocked in with a donor nucleotide encoding CD19-CAR (10,000 or 50,000 cells) and a donor nucleotide encoding GFP (10,000 or 50,000 cells). The term “only T” refers to a negative control, wherein untreated T cells were incubated with NALM6 cells. “**” or “***” indicates that that the difference between two results is statistically significant.

[0091] FIG. 35 shows the portion of T cells that showed B2M gene knocked out upon treatment with an RNP complex comprising CasΦ.12 L26R effector protein, wherein the cells were incubated with B2M antibody. Absence of B2M expression on surface of the T cells indicates successful knock out of B2M gene. Cas9 was used as a positive control. NT refers to nontreated cells.

[0092] FIGS. 36A-36B show T cell memory profiles in B2M gene knocked out T cells. The profiles were analyzed based on the portions of human T cell that differentiated into stem cell memory T cell (T_{SCM}), central memory T cell (T_{CM}), effector memory T cell (T_{EM}) and terminally differentiated T cell (T_{TE}). Each column shows the portions of human T cells, in order from bottom to top, T_{CM}, T_{SCM}, T_{EM}, and T_{TE}, respectively. The analysis was performed by incubating the T cells with CD4 antihuman antibody (FIG. 36A) and CD8 anti-human antibody (FIG. 36B). Cas9 was used as a positive control. NT refers to nontreated cells, wherein the T cells were not treated with the RNP complex. T cell donor refers to reference cells.

[0093] FIG. 37 shows the portion of T cells that showed B2M gene knocked out upon transfection with 500 pmol of guide RNA and 1 μg, 2 μg, 5 μg, and 10 μg of an mRNA encoding CasΦ.12 effector protein (WT Cas Phi), CasΦ.12 L26R effector protein (L26R Cas Phi), or CasM.265466 effector protein (Cas265466). The portion of B2M gene knocked out T cells was determined by incubating with a B2M antibody. Absence of B2M protein expression on surface of the T cells indicates successful knock out of B2M gene. Cas9 was used as a positive control. NT refers to nontreated cells.

[0094] FIG. 38 shows the portion of T cells that showed B2M gene knocked out upon transfection with 500 pmol of guide RNA and 1 μg, 2 μg, 5 μg, and 10 μg of an mRNA encoding CasΦ.12 effector protein (WT Cas Phi), CasΦ.12 L26R effector protein (L26R Cas Phi), or CasM.265466 effector protein (Cas265466). The portion of B2M gene knocked out T cells was determined by determining % indel observed. Cas9 was used as a positive control. NT refers to nontreated cells.

[0095] FIGS. 39A-39D show T cell memory profiles in B2M gene knocked out T cells. The profiles were analyzed based on the portions of human T cell that differentiated into stem cell memory T cell (T_{SCM}), central memory T cell (T_{CM}), effector memory T cell (T_{EM}) and terminally differentiated T cell (T_{TE}). Each column shows the portions of human T cells, in order from bottom to top, T_{CM}, T_{SCM}, T_{EM}, and T_{TE}, respectively. In some columns, only three human T cell portions, T_{CM}, T_{SCM}, and T_{EM}, are visible. The B2M gene was knocked out by transfecting T cells with 500 pmol of guide RNA and 1 μg, 2 μg, 5 μg, and 10 μg of an mRNA encoding CasΦ.12 effector protein (WT Cas Phi), CasΦ.12 L26R effector protein (L26R Cas Phi), or CasM.265466 effector protein (Cas265466). The analysis was performed by incubating treated T cells with CD4 antihuman antibody. Cas9 was used as a positive control. NT refers to nontreated cells, wherein the T cells were not treated with the RNP complex. T cell donor refers to reference cells.

[0096] FIGS. 40A-40D show T cell memory profiles in B2M gene knocked out T cells. The profiles were analyzed based on the portions of human T cells that differentiated into stem cell memory T cell (T_{SCM}), central memory T cell (T_{CM}), effector memory T cell (T_{EM}) and terminally differentiated T cell (T_{TE}). Each column shows the portions of human T cells, in order from bottom to top, T_{CM}, T_{SCM}, T_{EM}, and T_{TE}, respectively. In some columns, only three human T cell portions, T_{CM}, T_{SCM}, and T_{EM}, are visible. The B2M gene was knocked out by transfecting T cells with 500 pmol of guide RNA and 1 μg, 2 μg, 5 μg, and 10 μg of an mRNA encoding CasΦ.12 effector protein (WT Cas Phi), CasΦ.12 L26R effector protein (L26R Cas Phi), or CasM.265466 effector protein (Cas265466). The analysis was performed by incubating treated T cells with CD8 antihuman antibody. Cas9 effector protein was used as a positive control. NT refers to nontreated cells, wherein the T cells were not treated with the RNP complex. T cell donor refers to reference cells.

[0097] FIG. 41 illustrates the nuclease activity of CasM.265466 with flexible PAM sequences, in accordance with an embodiment of the present disclosure.

[0098] FIGS. 42A-42I illustrate results of CasM.265466 mediated GFP integration in T cells. FIGS. 42A-42C show FACS analysis of T cells treated with an RNP complex of CasM.265466 effector protein and a guide RNA having a sequence of SEQ ID NO: 2488, 2489 or 2490, respectively, wherein treated T cells were incubated with CD3 antibody to identify the portion of the treated T cells that have the TRAC gene knocked out. Absence of CD3 protein on surface of the treated T cells indicates successful knock out of TRAC gene. FIGS. 42D-42F show FACS analysis of T cells treated with the RNP complex and AAV6 particles containing a donor nucleotide sequence encoding a GFP marker. FIGS. 42D-42F show the portion of treated T cells expressing GFP, which indicates successfully GFP integration into TRAC gene locus. FIGS. 42G-42I show FACS analysis of negative control, wherein naïve T cells were transduced with AAV6 particles containing a donor nucleotide sequence encoding a GFP marker.

[0099] FIGS. 43A-43C show exemplary results of NGS and FACS analysis 6 days post AAV addition. FIG. 43A shows an alternate representation of FACS analysis of FIGS. 42A-42C. FIG. 43B shows % indel observed by NGS with each guide RNA having SEQ ID NO: 2488 (TRAC KO-R11500), SEQ ID NO: 2489 (TRAC KO-R11510), or SEQ ID NO: 2490 (TRAC KO-R11524). Similarly, FIG. 43C shows an alternate representation of FACS analysis of FIGS. 42D-42F. In FIGS. 43A-43C, “NT” refers to T cells that were not treated. Similarly, in FIGS. 43A and 43C, “TRAC KO only” refers to RNP treated T cells, “TRAC KO+AAV KI” refers to RNP treated T cells that were transduced with AAV6 particles containing a donor nucleotide sequence encoding a GFP marker, and “AAV only” refers to naïve T cells that were only transduced with AAV6 particles.

[0100] FIG. 44 illustrates the effects of an arginine substitution on CasM.265466 nuclease activity for a target nucleic acid, in accordance with an embodiment of the present disclosure.

[0101] FIG. 45 illustrates the dose titration curves of CasM.265466 arginine mutants, in accordance with an embodiment of the present disclosure.

[0102] FIGS. 46A-46B show results of NGS analysis for MLH1 gene editing by CasM.265466 effector protein relative to D220R variant thereof. Specifically, FIG. 46A shows a % indel generated by the effector proteins. FIG. 46B shows a donor nucleic acid insertion in effector protein treated HEK293T cells.

[0103] FIG. 47 shows the portion of T cells that showed B2M gene knocked out upon transfection with 500 pmol of guide RNA and 1 μg, 2 μg, 5 μg, and 10 μg of an mRNA encoding CasM.265466 effector protein (WT Cas466), and CasM.265466 D220R effector protein (D220R Cas 466). The portion of B2M gene knocked out T cells were determined by determining % indel observed. NT refers to nontreated cells.

[0104] FIG. 48 shows the portion of T cells that showed TRAC gene knocked out upon transfection with 500 pmol of guide RNA and 1 μg, 2 μg, 5 μg, and 10 μg of an mRNA encoding CasM.265466 effector protein (WT Cas466), CasM.265466 D220R effector protein (D220R Cas 466), and CasΦ.12 L26R effector protein (L26R Cas Phi). The portion of TRAC gene knocked out T cells were determined by determining % indel observed. Cas9 effector protein was used as a positive control. NT refers to nontreated cells.

### DETAILED DESCRIPTION

[0105] It is to be understood that both the foregoing general description and the following detailed description are exemplary, and explanatory only, and are not restrictive of the disclosure.

[0106] The section headings used herein are for organizational purposes only and are not to be construed as limiting the subject matter described.

[0107] All documents, or portions of documents, cited in this application, including, but not limited to, patents, patent applications, articles, books, and treatises, are hereby expressly incorporated by reference in their entirety for any purpose.

### Definitions

[0108] Unless otherwise indicated, all technical terms used herein have the same meaning as commonly understood by one of ordinary skill in the art to which this invention belongs. Unless otherwise indicated or obvious from context, the following terms have the following meanings:

[0109] As used in this specification and the appended claims, the singular forms “a,” “an,” and “the” include plural references unless the context clearly dictates otherwise.

[0110] Any reference to “or” herein is intended to encompass “and/or” unless otherwise stated. As used herein, the term “and/or” includes any and all combinations of one or more of the associated listed items.

[0111] Use of the term “including” as well as other forms, such as “includes” and “included,” is not limiting.

[0112] As used herein, the term, “comprise” and its grammatical equivalents, specifies the presence of stated features, integers, steps, operations, elements, and/or components, but does not preclude the presence or addition of one or more other features, integers, steps, operations, elements, components, and/or groups thereof.

[0113] As used herein, the term, “about,” in reference to a number or range of numbers, is understood to mean the stated number and numbers +/−10% thereof, or 10% below the lower listed limit and 10% above the higher listed limit for the values listed for a range.

[0114] The terms, “% identical,” “% identity,” and “percent identity,” or grammatical equivalents thereof, as used herein, refer to the extent to which two sequences (nucleotide or amino acid) have the same residue at the same positions in an alignment. For example, “an amino acid sequence is X % identical to SEQ ID NO: Y” can refer to % identity of the amino acid sequence to SEQ ID NO: Y and is elaborated as X % of residues in the amino acid sequence are identical to the residues of sequence disclosed in SEQ ID NO: Y. Generally, computer programs can be employed for such calculations. Illustrative programs that compare and align pairs of sequences, include ALIGN (Myers and Miller, Comput Appl Biosci. 1988 March; 4(1):11-7), FASTA (Pearson and Lipman, Proc Natl Acad Sci USA. 1988 April; 85(8):2444-8; Pearson, Methods Enzymol. 1990; 183:63-98) and gapped BLAST (Altschul et al., Nucleic Acids Res. 1997 Sep. 1; 25(17):3389-40), BLASTP, BLASTN, or GCG (Devereux et al., Nucleic Acids Res. 1984 Jan. 11; 12(1 Pt 1):387-95).

[0115] The term, “antigen,” as used herein, refers to a compound, composition, or substance that can be specifically bound by the products of specific humoral or cellular immunity (e.g., an antibody or T-cell receptor) and induce an immune response. An antigen can be any type of molecule including, for example, proteins, haptens, simple intermediary metabolites, sugars (e.g., oligosaccharides), lipids, and hormones, as well as macromolecules such as complex carbohydrates (e.g., polysaccharides) and phospholipids. Common categories of antigens include, but are not limited to, cancer cell antigens, tumor antigens, viral antigens, bacterial antigens, fungal antigens, protozoa and other parasitic antigens, antigens involved in autoimmune disease, allergy and graft rejection, toxins, and other miscellaneous antigens.

[0116] The term, “cancer,” as used herein, refers to a disease state characterized by the presence in a subject of cells demonstrating abnormal uncontrolled replication. The term cancer can be used interchangeably with the terms “carcino-,” “onco-,” and “tumor.” Non-limiting examples of cancers include: acute lymphoblastic leukemia; acute lymphoblastic lymphoma; acute lymphocytic leukemia; acute myelogenous leukemia; acute myeloid leukemia (adult/childhood); adrenocortical carcinoma; AIDS-related cancers; AIDS-related lymphoma; anal cancer; appendix cancer; astrocytoma; atypical teratoid/rhabdoid tumor; basal-cell carcinoma; bile duct cancer, extrahepatic (cholangiocarcinoma); bladder cancer; bone osteosarcoma/malignant fibrous histiocytoma; brain cancer (adult/childhood); brain tumor, cerebellar astrocytoma (adult/childhood); brain tumor, cerebral astrocytoma/malignant glioma brain tumor; brain tumor, ependymoma; brain tumor, medulloblastoma; brain tumor, supratentorial primitive neuroectodermal tumors; brain tumor, visual pathway and hypothalamic glioma; brainstem glioma; breast cancer; bronchial adenomas/carcinoids; bronchial tumor; Burkitt lymphoma; cancer of childhood; carcinoid gastrointestinal tumor; carcinoid tumor; carcinoma of adult, unknown primary site; carcinoma of unknown primary; central nervous system embryonal tumor; central nervous system lymphoma, primary; cervical cancer; childhood adrenocortical carcinoma; childhood cancers; childhood cerebral astrocytoma; chordoma, childhood; chronic lymphocytic leukemia; chronic myelogenous leukemia; chronic myeloid leukemia; chronic myeloproliferative disorders; colon cancer; colorectal cancer; craniopharyngioma; cutaneous T-cell lymphoma; desmoplastic small round cell tumor; emphysema; endometrial cancer; ependymoblastoma; ependymoma; esophageal cancer; Ewing sarcoma in the Ewing family of tumors; extracranial germ cell tumor; extragonadal germ cell tumor; extrahepatic bile duct cancer; gallbladder cancer; gastric (stomach) cancer; gastric carcinoid; gastrointestinal carcinoid tumor; gastrointestinal stromal tumor; germ cell tumor: extracranial, extragonadal, or ovarian gestational trophoblastic tumor; gestational trophoblastic tumor, unknown primary site; glioma; glioma of the brain stem; glioma, childhood visual pathway and hypothalamic; hairy cell leukemia; head and neck cancer; heart cancer; hepatocellular (liver) cancer; Hodgkin's lymphoma; hypopharyngeal cancer; hypothalamic and visual pathway glioma; intraocular melanoma; islet cell carcinoma (endocrine pancreas); Kaposi Sarcoma; kidney cancer (renal cell cancer); Langerhans cell histiocytosis; laryngeal cancer; lip and oral cavity cancer; liposarcoma; liver cancer (primary); lung cancer, non-small cell; lung cancer, small cell; lymphoma, primary central nervous system; macroglobulinemia, Waldenstrom; male breast cancer; malignant fibrous histiocytoma of bone/osteosarcoma; medulloblastoma; medulloepithelioma; melanoma; melanoma, intraocular (eye); Merkel cell cancer; Merkel cell skin carcinoma; mesothelioma; mesothelioma, adult malignant; metastatic squamous neck cancer with occult primary; mouth cancer; multiple endocrine neoplasia syndrome; multiple myeloma/plasma cell neoplasm; mycosis fungoides, myelodysplastic syndromes; myelodysplastic/myeloproliferative diseases; myelogenous leukemia, chronic; myeloid leukemia, adult acute; myeloid leukemia, childhood acute; myeloma, multiple (cancer of the bone-marrow); myeloproliferative disorders, chronic; nasal cavity and paranasal sinus cancer; nasopharyngeal carcinoma; neuroblastoma, non-small cell lung cancer; non-Hodgkin's lymphoma; oligodendroglioma; oral cancer; oral cavity cancer; oropharyngeal cancer; osteosarcoma/malignant fibrous histiocytoma of bone; ovarian cancer; ovarian epithelial cancer (surface epithelial-stromal tumor); ovarian germ cell tumor; ovarian low malignant potential tumor; pancreatic cancer; pancreatic cancer, islet cell; papillomatosis; paranasal sinus and nasal cavity cancer; parathyroid cancer; penile cancer; pharyngeal cancer; pheochromocytoma; pineal astrocytoma; pineal germinoma; pineal parenchymal tumors of intermediate differentiation; pineoblastoma and supratentorial primitive neuroectodermal tumors; pituitary tumor; pituitary adenoma; plasma cell neoplasia/multiple myeloma; pleuropulmonary blastoma; primary central nervous system lymphoma; prostate cancer; rectal cancer; renal cell carcinoma (kidney cancer); renal pelvis and ureter, transitional cell cancer; NUT midline carcinoma; retinoblastoma; rhabdomyosarcoma, childhood; salivary gland cancer; sarcoma, Ewing family of tumors; Sézary syndrome; skin cancer (melanoma); skin cancer (non-melanoma); small cell lung cancer; small intestine cancer soft tissue sarcoma; soft tissue sarcoma; spinal cord tumor; squamous cell carcinoma; squamous neck cancer with occult primary, metastatic; stomach (gastric) cancer; supratentorial primitive neuroectodermal tumor; T-cell lymphoma, cutaneous (Mycosis Fungoides and Sézary syndrome); testicular cancer; throat cancer; thymoma; thymoma and thymic carcinoma; thyroid cancer; thyroid cancer, childhood; transitional cell cancer of the renal pelvis and ureter; urethral cancer; uterine cancer, endometrial; uterine sarcoma; vaginal cancer; vulvar cancer; and Wilms Tumor.

[0117] The terms, “chimeric antigen receptor” and “CAR,” as used herein, refer to a fused protein comprising an extracellular domain capable of binding to an antigen, a transmembrane domain derived from a polypeptide different from a polypeptide from which the extracellular domain is derived, and at least one intracellular domain. A CAR is sometimes referred to in the art as a “chimeric receptor,” a “T-body,” or a “chimeric immune receptor (CIR).” The extracellular domain capable of binding to an antigen refers to any oligopeptide or polypeptide (e.g., antibody binding domain(s)) that can bind to an antigen. The transmembrane domain refers to any oligopeptide or polypeptide known to span the cell membrane and links the extracellular domain and the signaling domain. The intracellular domain refers to any oligopeptide or polypeptide known to function as a domain that transmits a signal to cause activation or inhibition of a biological process in a cell (primary signaling domain). In some instances, the intracellular domain can include one or more costimulatory signaling domains in addition to the primary signaling domain. A CAR can also include a hinge domain that serves as a linker between the extracellular and transmembrane domains.

[0118] The term, “CAR T cell,” as used herein, refers to a T cell that has a nucleotide sequence encoding a chimeric antigen receptor (CAR).

[0119] The terms, “cleave,” “cleaving,” and “cleavage,” as used herein, with reference to a nucleic acid molecule or nuclease activity of an effector protein, refer to the hydrolysis of a phosphodiester bond of a nucleic acid molecule that results in breakage of that bond. The result of this breakage can be a nick (hydrolysis of a single phosphodiester bond on one side of a double-stranded molecule), single strand break (hydrolysis of a single phosphodiester bond on a single-stranded molecule) or double strand break (hydrolysis of two phosphodiester bonds on both sides of a double-stranded molecule) depending upon whether the nucleic acid molecule is single-stranded (e.g., ssDNA or ssRNA) or double-stranded (e.g., dsDNA) and the type of nuclease activity being catalyzed by the effector protein.

[0120] The terms, “complementary” and “complementarity,” as used herein, with reference to a nucleic acid molecule or nucleotide sequence, refer to the characteristic of a polynucleotide having nucleotides that base pair with their Watson-Crick counterparts (C with G; or A with T) in a reference nucleic acid. For example, when every nucleotide in a polynucleotide forms a base pair with a reference nucleic acid, that polynucleotide is said to be 100% complementary to the reference nucleic acid. In a double stranded DNA or RNA sequence, the upper (sense) strand sequence is in general, understood as going in the direction from its 5′- to 3′-end, and the complementary sequence is thus understood as the sequence of the lower (antisense) strand in the same direction as the upper strand. Following the same logic, the reverse sequence is understood as the sequence of the upper strand in the direction from its 3′- to its 5′-end, while the ‘reverse complement’ sequence or the ‘reverse complementary’ sequence is understood as the sequence of the lower strand in the direction of its 5′- to its 3′-end. Each nucleotide in a double stranded DNA or RNA molecule that is paired with its Watson-Crick counterpart called its complementary nucleotide.

[0121] The terms, “CRISPR RNA” and “crRNA,” as used herein, refers to type of guide nucleic acid, wherein the nucleic acid is RNA comprising a first sequence, often referred to herein as a spacer sequence, that hybridizes to a target sequence of a target nucleic acid, and a second sequence that either a) hybridizes to a portion of a tracrRNA or b) is capable of being non-covalently bound by an effector protein. In some embodiments, the crRNA is covalently linked to an additional nucleic acid (e.g., a tracrRNA) that interacts with the effector protein.

[0122] The term, “donor nucleic acid,” as used herein, refers to a nucleic acid that is incorporated into a target nucleic acid or target sequence.

[0123] The term, “effective amount,” as used herein, refers to the amount of an agent (e.g., a cell), or combined amounts of two or more agents, that is sufficient to effect a beneficial or desired result. As a non-limiting example, when administered to a subject for the treatment of a disease, an effective amount is sufficient to affect such treatment for the disease. The effective amount will vary depending on the agent(s), the beneficial or desired result, the disease and its severity, and the age, weight, etc., of the subject.

[0124] The term, “effector protein,” as used herein, refers to a protein, polypeptide, or peptide that non-covalently binds to a guide nucleic acid to form a complex that contacts a target nucleic acid, wherein at least a portion of the guide nucleic acid hybridizes to a target sequence of the target nucleic acid. A complex between an effector protein and a guide nucleic acid can include multiple effector proteins or a single effector protein. In some instances, the effector protein modifies the target nucleic acid when the complex contacts the target nucleic acid. In some instances, the effector protein does not modify the target nucleic acid, but it is fused to a fusion partner protein that modifies the target nucleic acid when the complex contacts the target nucleic acid. A non-limiting example of an effector protein modifying a target nucleic acid is cleaving of a phosphodiester bond of the target nucleic acid. Additional examples of modifications an effector protein can make to target nucleic acids are described herein and throughout.

[0125] The term, “guide nucleic acid,” as used herein, refers to a nucleic acid comprising: a first nucleotide sequence that hybridizes to a target nucleic acid; and a second nucleotide sequence that is capable of being non-covalently bound by an effector protein. The first sequence may be referred to herein as a spacer sequence. The second sequence may be referred to herein as a repeat sequence. In some instances, the first sequence is located 5′ of the second nucleotide sequence. In some instances, the first sequence is located 3′ of the second nucleotide sequence.

[0126] The term, “handle sequence,” as used herein, refers to a sequence of nucleotides in a single guide RNA (sgRNA), that is: 1) capable of being non-covalently bound by an effector protein and 2) connects the portion of the sgRNA capable of being non-covalently bound by an effector protein to a nucleotide sequence that is hybridizable to a target nucleic acid. In general, the handle sequence comprises an intermediary sequence, that is capable of being non-covalently bound by an effector protein. In some instances, the handle sequence further comprises a repeat sequence. In such instances, the intermediary sequence or a combination of the intermediary sequence and the repeat sequence is capable of being non-covalently bound by an effector protein.

[0127] The term “immunologically compatible,” as used herein, refers to an agent (e.g., a cell) that is capable of being used in transfusion or grafting without rejection by the immune system of the recipient or result in the agent (e.g., a cell) attacking the recipient's normal cells or tissues (e.g., graft-vs-host disease).

[0128] The terms “indel,” “InDel,” “insertion-deletion,” and “indel mutation,” as used herein, refers to a type of genetic mutation that results from the insertion and/or deletion of nucleotides in a target nucleic acid. An indel can vary in length (e.g., 1 to 1,000 nucleotides in length) and be detected using methods well known in the art, including sequencing. If the number of nucleotides in the insertion/deletion is not divisible by three, and it occurs in a protein coding region, it is also a frameshift mutation.

[0129] The term, “intermediary sequence,” as used herein, in a context of a single nucleic acid system, refers to a nucleotide sequence in a handle sequence, wherein the nucleotide sequence is capable of, at least partially, being non-covalently bound to an effector protein to form a complex (e.g., an RNP complex). An intermediary sequence is not a transactivating nucleic acid in systems, methods, and compositions described herein.

[0130] The term, “pharmaceutically acceptable excipient, carrier or diluent,” as used herein, refers to any substance formulated alongside the active ingredient of a pharmaceutical composition that allows the active ingredient to retain biological activity and is non-reactive with the subject's immune system. Such a substance can be included for the purpose of long-term stabilization, bulking up solid formulations that contain potent active ingredients in small amounts, or to confer a therapeutic enhancement on the active ingredient in the final dosage form, such as facilitating absorption, reducing viscosity, or enhancing solubility. The selection of appropriate substance can depend upon the route of administration and the dosage form, as well as the active ingredient and other factors. Compositions having such substances can be formulated by well-known conventional methods (see, e.g., Remington's Pharmaceutical Sciences, 18th edition, A. Gennaro, ed., Mack Publishing Co., Easton, Pa., 1990; and Remington, The Science and Practice of Pharmacy 21st Ed. Mack Publishing, 2005).

[0131] The term, “protospacer adjacent motif (PAM),” as used herein, refers to a nucleotide sequence found in a target nucleic acid that directs an effector protein to modify the target nucleic acid at a specific location. A PAM sequence can be required for a complex having an effector protein and a guide nucleic acid to hybridize to and modify the target nucleic acid. However, a given effector protein may not require a PAM sequence being present in a target nucleic acid for the effector protein to modify the target nucleic acid.

[0132] The term, “proximity,” as used herein, refers to the state of being very near. Whether a substance, interaction, or activity is within proximity of a reference point will depend upon the context of that substance, interaction, or activity.

[0133] The term, “recombinant,” as used herein, as applied to proteins, polypeptides, peptides and nucleic acids, refers to proteins, polypeptides, peptides and nucleic acids that are products of various combinations of cloning, restriction, and/or ligation steps resulting in a construct having a structural coding or non-coding sequence distinguishable from endogenous nucleic acids found in natural systems. Generally, DNA sequences encoding the structural coding sequence can be assembled from cDNA fragments and short oligonucleotide linkers, or from a series of synthetic oligonucleotides, to provide a synthetic nucleic acid which is capable of being expressed from a recombinant transcriptional unit contained in a cell or in a cell-free transcription and translation system. Such sequences can be provided in the form of an open reading frame uninterrupted by internal non translated sequences, or introns, which are typically present in eukaryotic genes. Genomic DNA comprising the relevant sequences can also be used in the formation of a recombinant gene or transcriptional unit. Sequences of non-translated DNA can be present 5′ or 3′ from the open reading frame, where such sequences do not interfere with manipulation or expression of the coding regions and can act to modulate production of a desired product by various mechanisms. Thus, for example, the term “recombinant polynucleotide” or “recombinant nucleic acid” refers to one which is not naturally occurring, e.g., is made by the artificial combination of two otherwise separated segments of sequence through human intervention. This artificial combination is often accomplished by either chemical synthesis means, or by the artificial manipulation of isolated segments of nucleic acids, e.g., by genetic engineering techniques. Such is usually done to replace a codon with a redundant codon encoding the same or a conservative amino acid, while typically introducing or removing a sequence recognition site. Alternatively, it is performed to join together nucleic acid segments of desired functions to generate a desired combination of functions. Similarly, the term “recombinant polypeptide” or “recombinant protein” refers to one which is not naturally occurring, e.g., is made by the artificial combination of two otherwise separated segments of amino sequences through human intervention. Thus, for example, a polypeptide that includes a heterologous amino acid sequence is a recombinant polypeptide.

[0134] The term, “subject,” as used herein, refers to a biological entity containing expressed genetic materials. The biological entity can be a plant, animal, or microorganism, including, for example, bacteria, viruses, fungi, and protozoa. The subject can be tissues, cells and their progeny of a biological entity obtained in vivo or cultured in vitro. The subject can be a mammal. The mammal can be a human. The subject can be diagnosed or suspected of being at high risk for a disease. In some instances, the subject is not necessarily diagnosed or suspected of being at high risk for the disease.

[0135] The term, “T cell,” as used herein, refers to a type of lymphocyte that matures in the thymus. T cells play an important role in cell-mediated immunity and are distinguished from other lymphocytes, such as B cells, by the presence of a T-cell receptor on the cell surface. A T cell includes all types of immune cells expressing CD3, including: naïve T cells (cells that have not encountered their cognate antigens), T-helper cells (CD4⁺ cells), cytotoxic T-cells (CD8⁺ cells), natural killer T-cells, T-regulatory cells (T-reg) and gamma-delta T cells. Non-limiting exemplary sources for commercially available T cell lines include the American Type Culture Collection, or ATCC, and the German Collection of Microorganisms and Cell Cultures.

[0136] The term, “target nucleic acid,” as used herein, refers to a nucleic acid that is selected as the nucleic acid for modification, binding, hybridization or any other activity of or interaction with a nucleic acid, protein, polypeptide, or peptide described herein. A target nucleic acid can comprise RNA, DNA, or a combination thereof. A target nucleic acid can be single-stranded (e.g., single-stranded RNA or single-stranded DNA) or double-stranded (e.g., double-stranded DNA).

[0137] The term, “target sequence,” as used herein, when used in reference to a target nucleic acid, refers to a sequence of nucleotides found within a target nucleic acid. Such a sequence of nucleotides can, for example, hybridize to an equal length portion of a guide nucleic acid. Hybridization of the guide nucleic acid to the target sequence can bring an effector protein into contact with the target nucleic acid.

[0138] The term, “trans-activating RNA (tracrRNA),” as used herein, refers to a nucleic acid that comprises a first sequence that is capable of being non-covalently bound by an effector protein. TracrRNAs can comprise a second sequence that hybridizes to a portion of a crRNA, which may be referred to as a repeat hybridization sequence. In some embodiments, tracrRNAs are covalently linked to a crRNA.

[0139] The terms, “viral particle” and “virion,” as used herein, refer to the infective system of a virus as it exists outside of the host cell. A viral particle is typically composed of a viral genome and a protein coat called a capsid, which can be naked or enclosed in a lipoprotein envelope called the peplos. In some instances, the viral genome of a viral particle includes a viral vector. Non-limiting examples of viruses that a viral particle can be based on include retroviruses (e.g., lentiviruses and γ-retroviruses), adenoviruses, arenaviruses, alphaviruses, adeno-associated viruses (AAVs), baculoviruses, vaccinia viruses, herpes simplex viruses and poxviruses.

[0140] The term, “viral vector,” as used herein, refers to a nucleic acid to be delivered into a host cell via a recombinantly produced viral particle. The nucleic acid can be single-stranded or double stranded, linear or circular, segmented or non-segmented. The nucleic acid can comprise DNA, RNA, or a combination thereof. Non-limiting examples of viral particles that can deliver a viral vector include retroviruses (e.g., lentiviruses and γ-retroviruses), adenoviruses, arenaviruses, alphaviruses, adeno-associated viruses (AAVs), baculoviruses, vaccinia viruses, herpes simplex viruses and poxviruses. A viral vector delivered by viral particles may be referred to by the type of virus to deliver the viral vector (e.g., an AAV viral vector is a viral vector that is to be delivered by an adeno-associated virus particle). A viral vector referred to by the type of viral particle to deliver the viral vector can contain viral elements (e.g., nucleotide sequences) necessary for packaging of the viral vector into the virus or viral particle, replicating the virus, or other desired viral activities. A viral particle containing a viral vector can be replication competent, replication deficient or replication defective.

[0141] The terms, “beta-2 microglobulin” and “B2M,” as used herein, refer to the beta-2 microglobulin from any vertebrate source, including mammals such as primates (e.g., humans), dogs, and rodents (e.g., mice and rats), unless otherwise indicated. Beta-2-microglobulin is a serum protein found in association with the major histocompatibility complex (MHC) class I heavy chain on the surface of nearly all nucleated cells. The gene encoding human beta-2 microglobulin, referred to as B2M, contains 4 exons and spans approximately 8 kb, and is located on chromosome 15, at cytogenetic location 15q21.1. The amino acid sequence of human beta-2 microglobulin can be found at GenBank Accession No. AAA51811.1 and is provided below:

(SEQ ID NO: 1576)
MSRSVALAVLALLSLSGLEGIQRTPKIQVYSRHPAENGKSNFLNCYVSGF
HQSDIEVDLLKNGERIEKVEHSDLSFSKDWSFYLLYYTEFTPTEKDEYAC
RVNHVTLSQPKIVKWDRD.

[0142] An exemplary encoding nucleic acid sequence of human beta-2 microglobulin can be found at NCBI Reference Sequence NM_004048.4 and is provided below:

(SEQ ID NO: 1577)
attcctgaagctgacagcattcgggccgagatgtctcgctccgtggcctt
agctgtgctcgcgctactctctctttctggcctggaggctatccagcgta
ctccaaagattcaggtttactcacgtcatccagcagagaatggaaagtca
aatttcctgaattgctatgtgtctgggtttcatccatccgacattgaagt
tgacttactgaagaatggagagagaattgaaaaagtggagcattcagact
tgtctttcagcaaggactggtctttctatctcttgtactacactgaattc
acccccactgaaaaagatgagtatgcctgccgtgtgaaccatgtgacttt
gtcacagcccaagatagttaagtgggatcgagacatgtaagcagcatcat
ggaggtttgaagatgccgcatttggattggatgaattccaaattctgctt
gcttgctttttaatattgatatgcttatacacttacactttatgcacaaa
atgtagggttataataatgttaacatggacatgatcttctttataattct
actttgagtgctgtctccatgtttgatgtatctgagcaggttgctccaca
ggtagctctaggagggctggcaacttagaggtggggagcagagaattctc
ttatccaacatcaacatcttggtcagatttgaactcttcaatctcttgca
ctcaaagcttgttaagatagttaagcgtgcataagttaacttccaattta
catactctgcttagaatttgggggaaaatttagaaatataattgacagga
ttattggaaatttgttataatgaatgaaacattttgtcatataagattca
tatttacttcttatacatttgataaagtaaggcatggttgtggttaatct
ggtttatttttgttccacaagttaaataaatcataaaacttga.

[0143] The terms, “class II major histocompatibility complex transactivator” and “CIITA,” as used herein, refer to the class II major histocompatibility complex transactivator from any vertebrate source, including mammals such as primates (e.g., humans), dogs, and rodents (e.g., mice and rats), unless otherwise indicated. Class II major histocompatibility complex transactivator is protein with an acidic transcriptional activation domain, 4 LRRs (leucine-rich repeats) and a GTP binding domain. The protein is located in the nucleus and is the master regulator of MCH class II gene transcription and contributes to the transcription of MHC class I genes. The protein also uses GTP to facilitate its transport into the nucleus, and once there it uses an intrinsic acetyltransferase (AT) activity to act in a coactivator-like fashion. The gene encoding human class II major histocompatibility complex transactivator, referred to as CIITA, is located on chromosome 16, at cytogenetic location 16p13.13. The amino acid sequence of human beta-2 microglobulin can be found at GenBank Accession No. CAA52354.1 and is provided below:

(SEQ ID NO: 1578)
MRCLAPRPAGSYLSEPQGSSQCATMELGPLEGGYLELLNSDADPLCLYHF
YDQMDLAGEEEIELYSEPDTDTINCDQFSRLLCDMEGDEETREAYANIAE
LDQYVFQDSQLEGLSKDIFKHIGPDEVIGESMEMPAEVGQKSQKRPFPEE
LPADLKHWKPAEPPTVVTGSLLVGPVSDCSTLPCLPLPALFNQEPASGQM
RLEKTDQIPMPFSSSSLSCLNLPEGPIQFVPTISTLPHGLWQISEAGTGV
SSIFIYHGEVPQASQVPPPSGFTVHGLPTSPDRPGSTSPFAPSATDLPSM
PEPALTSRANMTEHKTSPTQCPAAGEVSNKLPKWPEPVEQFYRSLQDTYG
AEPAGPDGILVEVDLVQARLERSSSKSLERELATPDWAERQLAQGGLAEV
LLAAKEHRRPRETRVIAVLGKAGQGKSYWAGAVSRAWACGRLPQYDFVFS
VPCHCLNRPGDAYGLQDLLFSLGPQPLVAADEVFSHILKRPDRVLLILDA
FEELEAQDGFLHSTCGPAPAEPCSLRGLLAGLFQKKLLRGCTLLLTARPR
GRLVQSLSKADALFELSGFSMEQAQAYVMRYFESSGMTEHQDRALTLLRD
RPLLLSHSHSPTLCRAVCQLSEALLELGEDAKLPSTLTGLYVGLLGRAAL
DSPPGALAELAKLAWELGRRHQSTLQEDQFPSADVRTWAMAKGLVQHPPR
AAESELAFPSFLLQCFLGALWLALSGEIKDKELPQYLALTPRKKRPYDNW
LEGVPRFLAGLIFQPPARCLGALLGPSAAASVDRKQKVLARYLKRLQPGT
LRARQLLELLHCAHEAEEAGIWQHVVQELPGRLSFLGTRLTPPDAHVLGK
ALEAAGQDFSLDLRSTGICPSGLGSLVGLSCVTRFRAALSDTVALWESLR
QHGETKLLQAAEEKFTIEPFKAKSLKDVEDLGKLVQTQRTRSSSEDTAGE
LPAVRDLKKLEFALGPVSGPQAFPKLVRILTAFSSLQHLDLDALSENKIG
DEGVSQLSATFPQLKSLETLNLSQNNITDLGAYKLAEALPSLAASLLRLS
LYNNCICDVGAESLARVLPDMVSLRVMDVQYNKFTAAGAQQLAASLRRCP
HVETLAMWTPTIPFSVQEHLQQQDSRISLR.

[0144] An exemplary encoding nucleic acid sequence of human class II major histocompatibility complex transactivator can be found at NCBI Reference Sequence No. NM_001286402.1 and is provided below:

(SEQ ID NO: 1579)
ggttagtgatgaggctagtgatgaggctgtgtgcttctgagctgggcatccgaaggcatccttggggaagctgagggcacgagg
aggggctgccagactccgggagctgctgcctggctgggattcctacacaatgcgttgcctggctccacgccctgctgggtcctacctgtcaga
gccccaaggcagctcacagtgtgccaccatggagttggggcccctagaaggtggctacctggagcttcttaacagcgatgctgaccccctgt
gcctctaccacttctatgaccagatggacctggctggagaagaagagattgagctctactcagaacccgacacagacaccatcaactgcgac
cagttcagcaggctgttgtgtgacatggaaggtgatgaagagaccagggaggcttatgccaatatcgcggaactggaccagtatgtcttccag
gactcccagctggagggcctgagcaaggacattttcatagagcacataggaccagatgaagtgatcggtgagagtatggagatgccagcag
aagttgggcagaaaagtcagaaaagacccttcccagaggagcttccggcagacctgaagcactggaagccagctgagccccccactgtggt
gactggcagtctcctagtgggaccagtgagcgactgctccaccctgccctgcctgccactgcctgcgctgttcaaccaggagccagcctccg
gccagatgcgcctggagaaaaccgaccagattcccatgcctttctccagttcctcgttgagctgcctgaatctccctgagggacccatccagttt
gtccccaccatctccactctgccccatgggctctggcaaatctctgaggctggaacaggggtctccagtatattcatctaccatggtgaggtgcc
ccaggccagccaagtaccccctcccagtggattcactgtccacggcctcccaacatctccagaccggccaggctccaccagccccttcgctc
catcagccactgacctgcccagcatgcctgaacctgccctgacctcccgagcaaacatgacagagcacaagacgtcccccacccaatgccc
ggcagctggagaggtctccaacaagcttccaaaatggcctgagccggtggagcagttctaccgctcactgcaggacacgtatggtgccgag
cccgcaggcccggatggcatcctagtggaggtggatctggtgcaggccaggctggagaggagcagcagcaagagcctggagcgggaac
tggccaccccggactgggcagaacggcagctggcccaaggaggcctggctgaggtgctgttggctgccaaggagcaccggcggccgcgt
gagacacgagtgattgctgtgctgggcaaagctggtcagggcaagagctattgggctggggcagtgagccgggcctgggcttgtggccgg
cttccccagtacgactttgtcttctctgtcccctgccattgcttgaaccgtccgggggatgcctatggcctgcaggatctgctcttctccctgggcc
cacagccactcgtggcggccgatgaggttttcagccacatcttgaagagacctgaccgcgttctgctcatcctagacggcttcgaggagctgg
aagcgcaagatggcttcctgcacagcacgtgcggaccggcaccggcggagccctgctccctccgggggctgctggccggccttttccaga
agaagctgctccgaggttgcaccctcctcctcacagcccggccccggggccgcctggtccagagcctgagcaaggccgacgccctatttga
gctgtccggcttctccatggagcaggcccaggcatacgtgatgcgctactttgagagctcagggatgacagagcaccaagacagagccctg
acgctcctccgggaccggccacttcttctcagtcacagccacagccctactttgtgccgggcagtgtgccagctctcagaggccctgctggag
cttggggaggacgccaagctgccctccacgctcacgggactctatgtcggcctgctgggccgtgcagccctcgacagcccccccggggcc
ctggcagagctggccaagctggcctgggagctgggccgcagacatcaaagtaccctacaggaggaccagttcccatccgcagacgtgagg
acctgggcgatggccaaaggcttagtccaacacccaccgcgggccgcagagtccgagctggccttccccagcttcctcctgcaatgcttcct
gggggccctgtggctggctctgagtggcgaaatcaaggacaaggagctcccgcagtacctagcattgaccccaaggaagaagaggcccta
tgacaactggctggagggcgtgccacgctttctggctgggctgatcttccagcctcccgcccgctgcctgggagccctactcgggccatcgg
cggctgcctcggtggacaggaagcagaaggtgcttgcgaggtacctgaagcggctgcagccggggacactgcgggcgcggcagctgctg
gagctgctgcactgcgcccacgaggccgaggaggctggaatttggcagcacgtggtacaggagctccccggccgcctctcttttctgggca
cccgcctcacgcctcctgatgcacatgtactgggcaaggccttggaggcggcgggccaagacttctccctggacctccgcagcactggcatt
tgcccctctggattggggagcctcgtgggactcagctgtgtcacccgtttcagggctgccttgagcgacacggtggcgctgtgggagtccctg
cagcagcatggggagaccaagctacttcaggcagcagaggagaagttcaccatcgagcctttcaaagccaagtccctgaaggatgtggaag
acctgggaaagcttgtgcagactcagaggacgagaagttcctcggaagacacagctggggagctccctgctgttcgggacctaaagaaact
ggagtttgcgctgggccctgtctcaggcccccaggctttccccaaactggtgcggatcctcacggccttttcctccctgcagcatctggacctg
gatgcgctgagtgagaacaagatcggggacgagggtgtctcgcagctctcagccaccttcccccagctgaagtccttggaaaccctcaatct
gtcccagaacaacatcactgacctgggtgcctacaaactcgccgaggccctgccttcgctcgctgcatccctgctcaggctaagcttgtacaat
aactgcatctgcgacgtgggagccgagagcttggctcgtgtgcttccggacatggtgtccctccgggtgatggacgtccagtacaacaagttc
acggctgccggggcccagcagctcgctgccagccttcggaggtgtcctcatgtggagacgctggcgatgtggacgcccaccatcccattca
gtgtccaggaacacctgcaacaacaggattcacggatcagcctgagatgatcccagctgtgctctggacaggcatgttctctgaggacactaa
ccacgctggaccttgaactgggtacttgtggacacagctcttctccaggctgtatcccatgagcctcagcatcctggcacccggcccctgctgg
ttcagggttggcccctgcccggctgcggaatgaaccacatcttgctctgctgacagacacaggcccggctccaggctcctttagcgcccagtt
gggtggatgcctggtggcagctgcggtccacccaggagccccgaggccttctctgaaggacattgcggacagccacggccaggccagag
ggagtgacagaggcagccccattctgcctgcccaggcccctgccaccctggggagaaagtacttctttttttttatttttagacagagtctcactgt
tgcccaggctggcgtgcagtggtgcgatctgggttcactgcaacctccgcctcttgggttcaagcgattcttctgcttcagcctcccgagtagct
gggactacaggcacccaccatcatgtctggctaatttttcatttttagtagagacagggttttgccatgttggccaggctggtctcaaactcttgac
ctcaggtgatccacccacctcagcctcccaaagtgctgggattacaagcgtgagccactgcaccgggccacagagaaagtacttctccaccc
tgctctccgaccagacaccttgacagggcacaccgggcactcagaagacactgatgggcaacccccagcctgctaattccccagattgcaac
aggctgggcttcagtggcagctgcttttgtctatgggactcaatgcactgacattgttggccaaagccaaagctaggcctggccagatgcacca
gcccttagcagggaaacagctaatgggacactaatggggcggtgagaggggaacagactggaagcacagcttcatttcctgtgtcttttttcac
tacattataaatgtctctttaatgtcacaggcaggtccagggtttgagttcataccctgttaccattttggggtacccactgctctggttatctaatatg
taacaagccaccccaaatcatagtggcttaaaacaacactcacattta.

[0145] The terms, “T-cell receptor alpha-constant” and “TRAC,” as used herein, refer to the T-cell receptor alpha-constant from any vertebrate source, including mammals such as primates (e.g., humans), dogs, and rodents (e.g., mice and rats), unless otherwise indicated. T-cell receptor alpha-constant is the C-terminal portion of the T-cell receptor alpha chain, which is formed when 1 of at least 70 variable (V) genes, which encode the N-terminal antigen recognition domain, rearranges to 1 of 61 joining (J) gene segments to create a functional V region exon that is transcribed and spliced to the constant region gene (TRAC) segment. The gene encoding human T-cell receptor alpha-constant, referred to as TRAC, is located on chromosome 14, at cytogenetic location 14q11.2. The amino acid sequence of T-cell receptor alpha-constant can be found at UniProtKB/Swiss-Prot No. P01848.2 and is provided below:

(SEQ ID NO: 1580)
IQNPDPAVYQLRDSKSSDKSVCLFTDFDSQTNVSQSKDSDVYITDKTVLD
MRSMDFKSNSAVAWSNKSDFACANAFNNSIIPEDTFFPSPESSCDVKLVE
KSFETDTNLNFQNLSVIGFRILLLKVAGFNLLMTLRLWSS.

[0146] An exemplary encoding nucleic acid sequence of human T-cell receptor alpha-constant can be found at Ensembl No. ENST00000611116.2 and is provided below:

(SEQ ID NO: 1581)
atatccagaaccctgaccctgccgtgtaccagctgagagactctaaatcc
agtgacaagtctgtctgcctattcaccgattttgattctcaaacaaatgt
gtcacaaagtaaggattctgatgtgtatatcacagacaaaactgtgctag
acatgaggtctatggacttcaagagcaacagtgctgtggcctggagcaac
aaatctgactttgcatgtgcaaacgccttcaacaacagcattattccaga
agacaccttcttccccagcccagaaagttcctgtgatgtcaagctggtcg
agaaaagctttgaaacagatacgaacctaaactttcaaaacctgtcagtg
attgggttccgaatcctcctcctgaaagtggccgggtttaatctgctcat
gacgctgcggctgtggtccagctga.

[0147] Disclosed herein are non-naturally occurring compositions (e.g., viral vector, viral particle, CAR T cell, population of CAR T cells), kits, and systems comprising an effector protein (e.g., an engineered effector protein) and an engineered guide nucleic acid, which may simply be referred to herein as a guide nucleic acid. In general, an engineered effector protein and an engineered guide nucleic acid refer to an effector protein and a guide nucleic acid, respectively, that are not found in nature. In some embodiments, the compositions, kits, and systems comprise at least one non-naturally occurring component. For example, compositions, kits, and systems can comprise a guide nucleic acid, wherein the sequence of the guide nucleic acid is different or modified from that of a naturally occurring guide nucleic acid. In some embodiments, compositions, kits and systems comprise at least two components that do not naturally occur together. For example, compositions, kits and systems can comprise a guide nucleic acid comprising a repeat region and a spacer region which do not naturally occur together. Also, by way of example, compositions, kits, and systems can comprise a guide nucleic acid and an effector protein that do not naturally occur together. Conversely, and for clarity, an effector protein or guide nucleic acid that is “natural,” “naturally-occurring,” or “found in nature” includes effector proteins and guide nucleic acids from cells or organisms that have not been genetically modified by a human or machine.

[0148] There are a number of ways in which the compositions (e.g., viral vector, viral particle, CAR T cell, population of CART cells), kits, and systems described herein can be non-naturally occurring based on the guide nucleic acid. In some embodiments, the guide nucleic acid comprises a non-natural nucleotide sequence. In some embodiments, the non-natural sequence is a nucleotide sequence that is not found in nature. The non-natural sequence can comprise a portion of a naturally occurring sequence, wherein the portion of the naturally-occurring sequence is not present in nature, absent the remainder of the naturally-occurring sequence. In some embodiments, the guide nucleic acid comprises two naturally occurring sequences arranged in an order or proximity that is not observed in nature. In some embodiments, compositions, kits, and systems comprise a ribonucleotide complex comprising an effector protein and a guide nucleic acid that do not occur together in nature. Engineered guide nucleic acids can comprise a first sequence and a second sequence that do not occur naturally together. For example, an engineered guide nucleic acid can comprise a sequence of a naturally occurring repeat region and a spacer region that is complementary to a naturally-occurring eukaryotic sequence. The engineered guide nucleic acid can comprise a sequence of a repeat region that occurs naturally in an organism and a spacer region that does not occur naturally in that organism. An engineered guide nucleic acid can comprise a first sequence that occurs in a first organism and a second sequence that occurs in a second organism, wherein the first organism and the second organism are different. The guide nucleic acid can comprise a third sequence located at a 3′ or 5′ end of the guide nucleic acid, or between the first and second sequences of the guide nucleic acid. For example, an engineered guide nucleic acid can comprise a naturally occurring crRNA and tracrRNA sequence coupled by a linker sequence.

[0149] Similarly, there are a number of ways in which the compositions (e.g., viral vector, viral particle, CAR T cell, population of CAR T cells), kits, and systems described herein can be non-naturally occurring based on the effector protein. In some embodiments, compositions, kits, and systems described herein comprise an engineered effector protein that is similar to a naturally occurring effector protein. The engineered effector protein can lack a portion of the naturally occurring effector protein. The effector protein can comprise a mutation relative to the naturally occurring effector protein, wherein the mutation is not found in nature. The effector protein can also comprise at least one additional amino acid relative to the naturally occurring effector protein. For example, the effector protein can comprise an addition of a nuclear localization signal relative to the natural occurring effector protein. In certain embodiments, the nucleotide sequence encoding the effector protein is codon optimized (e.g., for expression in a eukaryotic cell) relative to the naturally occurring sequence.

### Vectors and Multiplexed Expression Vectors

[0150] Compositions, systems, and methods described herein comprise a vector or a use thereof. A vector can comprise a nucleic acid of interest. In some embodiments, the nucleic acid of interest comprises one or more components of a composition or system described herein. In some embodiments, the nucleic acid of interest comprises a nucleotide sequence that encodes one or more components of the composition or system described herein. In some embodiments, one or more components comprises effector proteins(s), guide nucleic acid(s), target nucleic acid(s), and donor nucleic acid(s). In some embodiments, the component comprises a nucleic acid encoding an effector protein, a donor nucleic acid, and a guide nucleic acid or a nucleic acid encoding the guide nucleic acid. In some embodiments, a vector may be part of a vector system. The vector system may comprise a library of vectors each encoding one or more component of a composition or system described herein. In some embodiments, components described herein (e.g., an effector protein, a guide nucleic acid, and/or a target nucleic acid) are encoded by the same vector. In some embodiments, components described herein (e.g., an effector protein, a guide nucleic acid, and/or a target nucleic acid) are each encoded by different vectors of the system.

[0151] In some embodiments, a vector comprises a nucleotide sequence encoding one or more effector proteins as described herein. In some embodiments, the one or more effector proteins comprise at least two effector proteins. In some embodiments, the at least two effector protein are the same. In some embodiments, the at least two effector proteins are different from each other. In some embodiments, the nucleotide sequence is operably linked to a promoter that is operable in a target cell, such as a eukaryotic cell. In some embodiments, the vector comprises the nucleotide sequence encoding 1, 2, 3, 4, 5, 6, 7, 8, 9, 10, 11, 12, 13, 14, 15, 16, 17, 18, 19, 20, 21, 22, 23, 24, 25, 26, 27, 28, 29, 30, 31, 32, 33, 34, 35, 36, 37, 38, 39, 40, 41, 42, 43, 44, 45, 46, 47, 48, 49, 50 or more effector proteins.

[0152] In some embodiments, a vector may encode one or more of any system components, including but not limited to effector proteins, guide nucleic acids, donor nucleic acids, and target nucleic acids as described herein. In some embodiments, a system component encoding sequence is operably linked to a promoter that is operable in a target cell, such as a eukaryotic cell. In some embodiments, a vector may encode 1, 2, 3, 4 or more of any system components. For example, a vector may encode two or more guide nucleic acids, wherein each guide nucleic acid comprises a different sequence. A vector may encode an effector protein and a guide nucleic acid. A vector may encode an effector protein, a guide nucleic acid, and a donor nucleic acid.

[0153] In some embodiments, a vector comprises one or more guide nucleic acids, or a nucleotide sequence encoding the one or more guide nucleic acids. In some embodiments, the one or more guide nucleic acids comprise at least two guide nucleic acids. In some embodiments, the at least two guide nucleic acids are the same. In some embodiments, the at least two guide nucleic acids are different from each other. In some embodiments, the guide nucleic acid or the nucleotide sequence encoding the guide nucleic acid is operably linked to a promoter that is operable in a target cell, such as a eukaryotic cell. In some embodiments, the vector comprises 1, 2, 3, 4, 5, 6, 7, 8, 9, 10, 11, 12, 13, 14, 15, 16, 17, 18, 19, 20, 21, 22, 23, 24, 25, 26, 27, 28, 29, 30, 31, 32, 33, 34, 35, 36, 37, 38, 39, 40, 41, 42, 43, 44, 45, 46, 47, 48, 49, 50 or more guide nucleic acids. In some embodiments, the vector comprises a nucleotide sequence encoding 1, 2, 3, 4, 5, 6, 7, 8, 9, 10, 11, 12, 13, 14, 15, 16, 17, 18, 19, 20, 21, 22, 23, 24, 25, 26, 27, 28, 29, 30, 31, 32, 33, 34, 35, 36, 37, 38, 39, 40, 41, 42, 43, 44, 45, 46, 47, 48, 49, 50 or more guide nucleic acids.

[0154] In some embodiments, a vector comprises one or more donor nucleic acids. In some embodiments, the one or more donor nucleic acids comprise at least two donor nucleic acids. In some embodiments, the at least two donor nucleic acids are the same. In some embodiments, the at least two donor nucleic acids are different from each other. In some embodiments, the vector comprises 1, 2, 3, 4, 5, 6, 7, 8, 9, 10, 11, 12, 13, 14, 15, 16, 17, 18, 19, 20, 21, 22, 23, 24, 25, 26, 27, 28, 29, 30, 31, 32, 33, 34, 35, 36, 37, 38, 39, 40, 41, 42, 43, 44, 45, 46, 47, 48, 49, 50 or more donor nucleic acids.

[0155] In some embodiments, a vector may comprise or encode one or more regulatory elements. Regulatory elements may refer to transcriptional and translational control sequences, such as promoters, enhancers, polyadenylation signals, terminators, protein degradation signals, and the like, that provide for and/or regulate transcription of a non-coding sequence or a coding sequence and/or regulate translation of an encoded polypeptide. In some embodiments, a vector may comprise or encode for one or more additional elements, such as, for example, replication origins, antibiotic resistance (or a nucleic acid encoding the same), a tag (or a nucleic acid encoding the same), selectable markers, and the like. In some embodiments, a vector comprises or encodes for one or more elements, such as, for example, ribosome binding sites, and RNA splice sites.

[0156] Vectors described herein can encode a promoter —a regulatory region on a nucleic acid, such as a DNA sequence, capable of initiating transcription of a downstream (3′ direction) coding or non-coding sequence. A promoter can be linked at its 3′ terminus to a nucleic acid, the expression or transcription of which is desired, and extends upstream (5′ direction) to include bases or elements necessary to initiate transcription or induce expression, which could be measured at a detectable level. A promoter can comprise a nucleotide sequence. The promoter can include a transcription initiation site, and one or more protein binding domains responsible for the binding of transcription machinery, such as RNA polymerase. When eukaryotic promoters are used, such promoters can contain “TATA” boxes and “CAT” boxes. Various promoters, including inducible promoters, may be used to drive expression, i.e., transcriptional activation, of the nucleic acid of interest. Accordingly, in some embodiments, the nucleic acid of interest can be operably linked to a promoter.

[0157] Promotors may be any suitable type of promoter envisioned for the compositions, systems, and methods described herein. Examples include constitutively active promoters (e.g., CMV promoter), inducible promoters (e.g., heat shock promoter, tetracycline-regulated promoter, steroid-regulated promoter, metal-regulated promoter, estrogen receptor-regulated promoter, etc.), spatially restricted and/or temporally restricted promoters (e.g., a tissue specific promoter, a cell type specific promoter, etc.), etc. Suitable promoters include, but are not limited to: SV40 early promoter, mouse mammary tumor virus long terminal repeat (LTR) promoter; adenovirus major late promoter (Ad MLP); a herpes simplex virus (HSV) promoter, a cytomegalovirus (CMV) promoter such as the CMV immediate early promoter region (CMVIE), a rous sarcoma virus (RSV) promoter, a human U6 small nuclear promoter (U6), an enhanced U6 promoter, and a human Hl promoter (Hl). By transcriptional activation, it is intended that transcription will be increased above basal levels in the target cell by 2 fold, 5 fold, 10 fold, 50 fold, by 100 fold, 500 fold, or by 1000 fold, or more. In addition, vectors used for providing a nucleic acid that, when transcribed, produces a guide nucleic acid and/or a nucleic acid that encodes an effector protein to a cell may include nucleic acid sequences that encode for selectable markers in the target cells, so as to identify cells that have taken up the guide nucleic acid and/or the effector protein.

[0158] In general, vectors provided herein comprise at least one promotor or a combination of promoters driving expression or transcription of one or more genome editing tools described herein. In some embodiments, the vector comprises a nucleotide sequence of a promoter. In some embodiments, the vector comprises two promoters. In some embodiments, the vector comprises three promoters. In some embodiments, a length of the promoter is less than about 500, less than about 400, less than about 300, or less than about 200 linked nucleotides. In some embodiments, a length of the promoter is at least 100, at least 200, at least 300, at least 400, or at least 500 linked nucleotides. Non-limiting examples of promoters include CMV, EF1a, 7SK, RPBSA, hPGK, EFS, SV40, PGK1, Ube, human beta actin promoter, CAG, MND, TRE, UAS, Ac5, Polyhedrin, CaMKIIa, GAL1-10, H1, TEF1, GDS, ADH1, CaMV35S, HSV TK, Ubi, U6, MNDU3, and MSCV. In some embodiments, the promoter for the guide nucleic acid is a U6 promoter, having a length of about 249 linked nucleotides. In some embodiments, the promoter for the Cas effector is an EFS promoter, having a length of about 231 linked nucleotides.

[0159] In some embodiments, the promoter for expressing effector protein is a ubiquitous promoter. In some embodiments, the ubiquitous promoter comprises MND or CAG promoter sequence. In some embodiments, the promoter is a tissue-specific promoter that has activity in only certain cell types. In some embodiments, the cell type is a T cell. Non-limiting examples of promoters particularly suitable for T cell expression include a EF-1 promoter, an RPBSA promoter, a hPGK promoter, and a CMV promoter, as described further in Rad et al., (2020), PLoS ONE, 15(7):e0232915. In some embodiments, the promoter is a constitutive promoter. In some embodiments, the promoter is an inducible promoter that only drives expression of its corresponding gene when a signal is present, e.g., a hormone, a small molecule, a peptide. Non-limiting examples of inducible promoters are the T7 RNA polymerase promoter, the T3 RNA polymerase promoter, the Isopropyl-beta-D-thiogalactopyranoside (IPTG)-regulated promoter, a lactose induced promoter, a heat shock promoter, a tetracycline-regulated promoter (tetracycline-inducible or tetracycline-repressible), a steroid regulated promoter, a metal-regulated promoter, and an estrogen receptor-regulated promoter. In some embodiments, the promoter is an activation-inducible promoter, such as a CD69 promoter, as described further in Kulemzin et al., (2019), BMC Med Genomics, 12:44.

[0160] In some embodiments, the promoters are prokaryotic promoters (e.g., drive expression of a gene in a prokaryotic cell). In some embodiments, the promoters are eukaryotic promoters, (e.g. drive expression of a gene in a eukaryotic cell). In some embodiments, the promoter is EF1a. In some embodiments, the promoter is ubiquitin. In some embodiments, vectors are bicistronic or polycistronic vector (e.g., having or involving two or more loci responsible for generating a protein) having an internal ribosome entry site (IRES) is for translation initiation in a cap-independent manner.

[0161] In some embodiments, a vector described herein is a nucleic acid expression vector. In some embodiments, a vector described herein is a recombinant expression vector. In some embodiments, a vector described herein is a messenger RNA.

[0162] In some embodiments, a vector described herein is a delivery vector. In some embodiments, the delivery vector is a eukaryotic vector, a prokaryotic vector (e.g., a bacterial vector) a viral vector, or any combination thereof. In some embodiments, the delivery vehicle is a non-viral vector. In some embodiments, the delivery vector is a plasmid. In some embodiments, the plasmid comprises DNA. In some embodiments, the plasmid comprises RNA. In some embodiments, the plasmid comprises circular double-stranded DNA. In some embodiments, the plasmid is linear. In some embodiments, the plasmid comprises one or more coding sequences of interest and one or more regulatory elements. In some embodiments, the plasmid comprises a bacterial backbone containing an origin of replication and an antibiotic resistance gene or other selectable marker for plasmid amplification in bacteria. In some embodiments, the plasmid is a minicircle plasmid. In some embodiments, the plasmid contains one or more genes that provide a selective marker to induce a target cell to retain the plasmid. In some examples, the plasmids are engineered through synthetic or other suitable means known in the art. For example, in some embodiments, the genetic elements are assembled by restriction digest of the desired genetic sequence from a donor plasmid or organism to produce ends of the DNA which is then be readily ligated to another genetic sequence.

[0163] In some embodiments, vectors comprise an enhancer. Enhancers are nucleotide sequences that have the effect of enhancing promoter activity. In some embodiments, enhancers augment transcription regardless of the orientation of their sequence. In some embodiments, enhancers activate transcription from a distance of several kilo basepairs. Furthermore, enhancers are located optionally upstream or downstream of a gene region to be transcribed, and/or located within the gene, to activate the transcription. Exemplary enhancers include, but are not limited to, WPRE; CMV enhancers; the R-U5′ segment in LTR of HTLV-I.

[0164] In some embodiments, vectors described herein include elements for abrogating allogeneic immune reactions of T cells when transfused or grafted into a subject, while simultaneously directing the immune activity of the T cells to a specific antigen (e.g., a cancer specific antigen expressed by a cancer cell) through introduction of a donor nucleic acid encoding a chimeric antigen receptor (CAR). Accordingly, vectors provided herein comprises a first nucleotide sequence that encodes an effector protein, a second nucleotide sequence that produces a guide nucleic acid for targeting the effector protein to the gene encoding T-cell receptor alpha-constant (TRAC gene), a third nucleotide sequence that produces a guide nucleic acid for targeting the effector protein to the gene encoding beta-2 microglobulin (B2M gene), a fourth nucleotide sequence that produces a guide nucleic acid for targeting the effector protein to the gene encoding human class II major histocompatibility complex transactivator (CIITA gene), and/or a fifth nucleotide sequence that includes a donor nucleic acid encoding a CAR and a nucleotide sequence that directs integration of the donor nucleic acid into the TRAC gene.

[0165] In some cases, the second nucleotide sequence when transcribed and/or cleaved by the effector protein, produces a guide nucleic acid. In some embodiments, the guide nucleic acid comprises a sequence that is at least 80%, at least 85%, at least 90%, at least 95%, at least 96%, at least 97%, at least 98%, at least 99%, or 100% identical or complementary to an equal length portion of a target sequence of a gene encoding the human T-cell receptor alpha-constant (TRAC gene), the human beta-2 microglobulin (B2M gene), or the human class II major histocompatibility complex transactivator (CIITA gene). In some embodiments, the guide nucleic acid comprises a nucleotide sequence that the effector protein binds. In some embodiments, the effector protein comprises a sequence with at least about: 80%, 85%, 90%, 95%, 96%, 97%, 98%, or 99% sequence homology to any one of the amino acid sequences recited in TABLE 1. In some embodiments, the effector protein comprises a sequence with at least about: 80%, 85%, 90%, 95%, 96%, 97%, 98%, or 99% sequence homology to SEQ ID NO: 2435. In some embodiments, the guide nucleic acid comprises a sequence with at least about: 80%, 85%, 90%, 95%, 96%, 97%, 98%, or 99% sequence identity to any one of the sequences recited in TABLE 5, TABLE 5.1, TABLE 9, TABLE 9.1, TABLE 10, TABLE 10.1, TABLE 14, and TABLE 14.1. In some embodiments, the guide nucleic acid comprises any one of the sequences recited in TABLE 5, TABLE 5.1, TABLE 9, TABLE 9.1, TABLE 10, TABLE 10.1, TABLE 14, and TABLE 14.1. In some embodiments, the guide nucleic acid comprises a sequence with at least about: 80%, 85%, 90%, 95%, 96%, 97%, 98%, or 99% sequence identity to any one of the sequences recited in TABLE 6, TABLE 6.1, TABLE 11, TABLE 11.1, TABLE 12, TABLE 12.1, TABLE 15, and TABLE 15.1. In some embodiments, the guide nucleic acid comprises any one of the sequences recited in TABLE 6, TABLE 6.1, TABLE 11, TABLE 11.1, TABLE 12, TABLE 12.1, TABLE 15, and TABLE 15.1. In some embodiments, the guide nucleic acid comprises a sequence with at least about: 80%, 85%, 90%, 95%, 96%, 97%, 98%, or 99% sequence identity to any one of the sequences recited in TABLE 7, TABLE 7.1, TABLE 8, TABLE 13, and TABLE 16. In some embodiments, the guide nucleic acid comprises any one of the sequences recited in TABLE 7, TABLE 7.1, TABLE 8, TABLE 13, and TABLE 16.

[0166] Alternatively, or in addition to targeting the T-cell receptor alpha-constant (TRAC gene) as described herein, in some embodiments, guide nucleic acids can be designed for targeting one or more of the human T-cell receptor f chain variable regions similar to the TRAC gene. Accordingly, in some embodiments, the guide nucleic is capable of being bound by an effector protein having any one of the amino acid sequence recited in TABLE 1, wherein the guide nucleic acid comprises a spacer sequence that is at least 80%, at least 85%, at least 90%, at least 95%, at least 96%, at least 97%, at least 98%, at least 99%, or 100% identical or complementary to an equal length portion of a target sequence of a gene encoding any one of the thirty known human T-cell receptor R chain variable regions. In some embodiments, the guide nucleic acid comprises a nucleotide sequence that is at least 80%, at least 85%, at least 90%, at least 95%, at least 98% or 100% identical to a sequence recited in any one of TABLES 2-4. Moreover, in such embodiments, the effector protein comprises a sequence with at least about: 80%, 85%, 90%, 95%, 96%, 97%, 98%, or 99% sequence homology to any one of the amino acid sequences recited in TABLE 1. In some embodiments, vectors may comprise a first nucleotide sequence that encodes an effector protein, a second nucleotide sequence that produces a guide nucleic acid for targeting the effector protein to the gene encoding T-cell receptor R chain variable region, a third nucleotide sequence that produces a guide nucleic acid for targeting the effector protein to the gene encoding beta-2 microglobulin (B2M gene), a fourth nucleotide sequence that produces a guide nucleic acid for targeting the effector protein to the gene encoding human class II major histocompatibility complex transactivator (CIITA gene), and/or a fifth nucleotide sequence that includes a donor nucleic acid encoding a CAR and a nucleotide sequence that directs integration of the donor nucleic acid into the T-cell receptor R chain variable regions.

[0167] Alternatively or in addition to targeting the B2M gene and CIITA gene as described herein, in some embodiments, guide nucleic acids can be designed for targeting a gene encoding human NOD-like receptor family CARD domain containing 5 (NLRC5 gene). Accordingly, in some embodiments, vectors may comprise: (1) a first nucleotide sequence that encodes an effector protein; (2) a second nucleotide sequence that produces a guide nucleic acid for targeting the effector protein to the gene targeting T-cell receptor (TRAC gene or a gene encoding R chain variable region); (3) at least two of the following three nucleotide sequences: (a) a third nucleotide sequence that produces a guide nucleic acid for targeting the effector protein to the gene encoding B2M gene, (b) a fourth nucleotide sequence that produces a guide nucleic acid for targeting the effector protein to CIITA gene, and (c) a fifth nucleotide sequence that produces a guide nucleic acid for targeting the effector protein to NLRC5 gene; and/or a sixth nucleotide sequence that includes a donor nucleic acid encoding a CAR and a nucleotide sequence that directs integration of the donor nucleic acid into the T-cell receptor.

[0168] Also provided herein are T-cells comprising the vector described herein. Also provided herein are NK-cells comprising the vector described herein. In some embodiments, the T-cells and/or NK-cells having the one or more genes located on one of two alleles that are being targeted as described herein are independently modified. Accordingly, in some embodiments, the T-cells and/or NK-cells comprise a modification of one allele for one or more genes described herein. In some embodiments, the T-cells and/or NK-cells comprise a modification of both alleles for the one or more gene described herein. In some embodiments, the T-cells or NK-cells comprise a modification of at least one of the two alleles of the genes being targeted, wherein the one or more genes being targeted is selected from T-cell receptor (TRAC gene or a gene encoding f chain variable region), B2M gene, CIITA gene, and NLRC5 gene. In some embodiments, the T-cells or NK-cells comprise a modification of both alleles for the one or more gens being targeted, wherein the one or more genes being targeted is selected from T-cell receptor (TRAC gene or a gene encoding f chain variable region), B2M gene, CIITA gene, and NLRC5 gene.

[0169] Also provided herein are methods of producing a population of immunologically compatible chimeric antigen receptor (CAR) T cells comprising: contacting ex vivo a population of T cells with a viral vector described herein, for a sufficient period of time to allow for viral transduction of T cells contained in the population; and culturing the population of T cells for sufficient period of time for indels to occur in the TRAC gene, the B2M gene or the CIITA gene, thereby producing the population of immunologically compatible CAR T cells.

### Administration of a Non-Viral Vector

[0170] In some embodiments, an administration of a non-viral vector comprises contacting a cell, such as a host cell, with the non-viral vector. In some embodiments, a physical method or a chemical method is employed for delivering the vector into the cell. Exemplary physical methods include electroporation, gene gun, sonoporation, magnetofection, or hydrodynamic delivery. Exemplary chemical methods include delivery of the recombinant polynucleotide by liposomes such as, cationic lipids or neutral lipids; lipofection; dendrimers; lipid nanoparticle (LNP); or cell-penetrating peptides.

[0171] In some embodiments, a vector is administered as part of a method of nucleic acid editing, and/or treatment as described herein. In some embodiments, a vector is administered in a single vehicle, such as a single expression vector. In some embodiments, at least two of the three components, a nucleic acid encoding one or more effector proteins, one or more donor nucleic acids, and one or more guide nucleic acids or a nucleic acid encoding the one or more guide nucleic acid, are provided in the single expression vector. In some embodiments, components, such as a guide nucleic acid and an effector protein, are encoded by the same vector. In some embodiments, an effector protein (or a nucleic acid encoding same) and/or an engineered guide nucleic acid (or a nucleic acid that, when transcribed, produces same) are not co-administered with donor nucleic acid in a single vehicle. In some embodiments, an effector protein (or a nucleic acid encoding same), an engineered guide nucleic acid (or a nucleic acid that, when transcribed, produces same), and/or donor nucleic acid are administered in one or more or two or more vehicles, such as one or more, or two or more expression vectors.

[0172] In some embodiments, a vector system is administered as part of a method of nucleic acid detection, editing, and/or treatment as described herein, wherein at least two vectors are co-administered. In some embodiments, the at least two vectors comprise different components. In some embodiments, the at least two vectors comprise the same component having different sequences. In some embodiments, at least one of the three components, a nucleic acid encoding one or more effector proteins, one or more donor nucleic acids, and one or more guide nucleic acids or a nucleic acid encoding the one or more guide nucleic acids, or a variant thereof is provided in a different vector. In some embodiments, the nucleic acid encoding the effector protein, and a guide nucleic acid or a nucleic acid encoding the guide nucleic acid are provided in different vectors. In some embodiments, the donor nucleic acid is encoded by a different vector than the vector encoding the effector protein and the guide nucleic acid.

### Lipid Particles and Non-Viral Vectors

[0173] In some embodiments, compositions and systems provided herein comprise a lipid particle. In some embodiments, a lipid particle is a lipid nanoparticle (LNP). In some embodiments, a lipid or a lipid nanoparticle can encapsulate an expression vector as described herein. LNPs are a non-viral delivery system for delivery of the composition and/or system components described herein. LNPs are particularly effective for delivery of nucleic acids. Beneficial properties of LNP include ease of manufacture, low cytotoxicity and immunogenicity, high efficiency of nucleic acid encapsulation and cell transfection, multi-dosing capabilities and flexibility of design (Kulkami et al., (2018) Nucleic Acid Therapeutics, 28(3):146-157). In some embodiments, compositions and methods comprise a lipid, polymer, nanoparticle, or a combination thereof, or use thereof, to introduce one or more effector proteins, one or more guide nucleic acids, one or more donor nucleic acids, or any combinations thereof to a cell. Non-limiting examples of lipids and polymers are cationic polymers, cationic lipids, ionizable lipids, or bio-responsive polymers. In some embodiments, the ionizable lipids exploits chemical-physical properties of the endosomal environment (e.g., pH) offering improved delivery of nucleic acids. In some embodiments, the ionizable lipids are neutral at physiological pH. In some embodiments, the ionizable lipids are protonated under acidic pH. In some embodiments, the bio-responsive polymer exploits chemical-physical properties of the endosomal environment (e.g., pH) to preferentially release the genetic material in the intracellular space.

[0174] In some embodiments, a LNP comprises an outer shell and an inner core. In some embodiments, the outer shell comprises lipids. In some embodiments, the lipids comprise modified lipids. In some embodiments, the modified lipids comprise pegylated lipids. In some embodiments, the lipids comprise one or more of cationic lipids, anionic lipids, ionizable lipids, and non-ionic lipids. In some embodiments, the LNP comprises one or more of N1,N3, N5-tris(3-(didodecylamino)propyl)benzene-1,3,5-tricarboxamide (TT3), 2-dioleoyl-sn-glycero-3-phosphoethanolamine (DOPE), 1-palmitoyl-2-oleoylsn-glycero-3-phosphoethanolamine (POPE), 1,2-distearoyl-sn-glycero-3-phosphocholine (DSPC), cholesterol (Chol), 1,2-dimyristoyl-sn-glycerol, and methoxypolyethylene glycol (DMG-PEChooo), derivatives, analogs, or variants thereof. In some embodiments, the LNP has a negative net overall charge prior to complexation with one or more of a guide nucleic acid, a nucleic acid encoding the one or more guide nucleic acid, a nucleic acid encoding the effector protein, and/or a donor nucleic acid. In some embodiments, the inner core is a hydrophobic core. In some embodiments, the one or more of a guide nucleic acid, the one or more nucleic acid encoding the one or more guide nucleic acid, one or more nucleic acid encoding one or more effector protein, and/or the one or more donor nucleic acid forms a complex with one or more of the cationic lipids and the ionizable lipids. In some embodiments, the nucleic acid encoding the effector protein or the nucleic acid encoding the guide nucleic acid is self-replicating.

[0175] In some embodiments, a LNP comprises one or more of cationic lipids, ionizable lipids, and modified versions thereof. In some embodiments, the ionizable lipid comprises TT3 or a derivative thereof. Accordingly, in some embodiments, the LNP comprises one or more of TT3 and pegylated TT3. The publication WO2016187531 is hereby incorporated by reference in its entirety, which describes representative LNP formulations in Table 2 and Table 3, and representative methods of delivering LNP formulations in Example 7.

[0176] In some embodiments, a LNP comprises a lipid composition targeting to a specific organ. In some embodiments, the lipid composition comprises lipids having a specific alkyl chain length that controls accumulation of the LNP in the specific organ (e.g., liver or spleen). In some embodiments, the lipid composition comprises a biomimetic lipid that controls accumulation of the LNP in the specific organ (e.g., brain). In some embodiments, the lipid composition comprises lipid derivatives (e.g., cholesterol derivatives) that controls accumulation of the LNP in a specific cell (e.g., liver endothelial cells, Kupffer cells, hepatocytes).

### Viral Vectors

[0177] Disclosed herein, in some aspects, are viral vectors that include elements for abrogating allogeneic immune reactions of T cells when transfused or grafted into a subject, while simultaneously directing the immune activity of the T cells to a specific antigen (e.g., a cancer specific antigen expressed by a cancer cell) through introduction of a donor nucleic acid encoding a chimeric antigen receptor (CAR). Accordingly, viral vectors provided herein include nucleotide sequences that provide certain features: 1) a nucleotide sequence that encodes an effector protein; 2) a nucleotide sequence that produces a guide nucleic acid for targeting the effector protein to the gene encoding T-cell receptor alpha-constant (TRAC gene); 3) a nucleotide sequence that produces a guide nucleic acid for targeting the effector protein to the gene encoding beta-2 microglobulin (B2M gene); 4) a nucleotide sequence that produces a guide nucleic acid for targeting the effector protein to the gene encoding human class II major histocompatibility complex transactivator (CIITA gene); and/or 5) a nucleotide sequence that includes a donor nucleic acid encoding a CAR and a nucleotide sequence that directs integration of the donor nucleic acid into the TRAC gene.

[0178] In some embodiments, provided herein is a viral vector comprising a nucleotide sequence that encodes an effector protein as described herein. In some embodiments, provided herein is a viral vector comprising a nucleotide sequence that produces a guide nucleic acid, as described herein, for targeting the effector protein to a specific gene (e.g., TRAC gene, B2M gene and/or CIITA gene). In some embodiments, provided herein is a viral vector comprising a nucleotide sequence that comprises a donor nucleic acid and one or more nucleotide sequences for directing its integration into the TRAC gene, wherein the donor nucleic acid encodes a CAR.

[0179] Accordingly, in some embodiments, provided herein is a viral vector comprising a first nucleotide sequence that encodes an effector protein as described herein, a second nucleotide sequence that produces a first guide nucleic acid for targeting the effector protein to the TRAC gene as described herein, a third nucleotide sequence that produces a second guide nucleic acid for targeting the effector protein to the B2M gene as described herein, a fourth nucleotide sequence that produces a third guide nucleic acid for targeting the effector protein to the CIITA gene as described herein, and a fifth nucleotide sequence that comprises a donor nucleic acid encoding a CAR and one or more nucleotide sequences for directing integration of the donor nucleic acid into the TRAC gene as described herein.

[0180] In some embodiments, provided herein are viral vectors comprising: a nucleotide sequence that encodes an effector protein and a second nucleotide sequence. In some embodiments, the viral vector is an scAAV vector. In some embodiments, a plasmid encoding the scAAV vector comprises a nucleotide sequence that encodes an effector protein with at least about: 90%, 95%, 96%, 97%, 98%, or 99% sequence identity to any one of the sequences recited in TABLE 1. In some embodiments, a plasmid encoding the scAAV vector comprises a nucleotide sequence that encodes an effector protein having the amino acid sequence of any one of the sequences recited in TABLE 1. In some embodiments, a plasmid encoding the scAAV vector comprises a nucleotide sequence encoding an effector protein with at least about: 90%, 95%, 96%, 97%, 98%, or 99% sequence identity to SEQ ID NO: 2435. In some embodiments, a plasmid encoding the scAAV vector comprises a nucleotide sequence encoding an effector protein having the amino acid sequence of SEQ ID NO: 2435. Also provided herein are T-cells comprising the viral vector. Also provided herein are NK-cells comprising the viral vector.

### Delivery of Viral Vectors

[0181] In some embodiments, the viral vector comprises a nucleic acid to be delivered into a host cell by a recombinantly produced virus or viral particle. The nucleic acid may be single-stranded or double stranded, linear or circular, segmented or non-segmented. The nucleic acid may comprise DNA, RNA, or a combination thereof. In some embodiments, the vector is an adeno-associated viral vector. There are a variety of viral vectors that are associated with various types of viruses, including but not limited to retroviruses (e.g., lentiviruses and γ-retroviruses), adenoviruses, arenaviruses, alphaviruses, adeno-associated viruses (AAVs), baculoviruses, vaccinia viruses, herpes simplex viruses and poxviruses. A viral vector provided herein can be derived from or based on any such virus. In some embodiments, the viral vector is a recombinant viral vector. In some embodiments, the vector is a retroviral vector. In some embodiments, the retroviral vector is a lentiviral vector. In some embodiments, the retroviral vector comprises gamma-retroviral vector. A viral vector provided herein may be derived from or based on any such virus. For example, in some embodiments, the gamma-retroviral vector is derived from a Moloney Murine Leukemia Virus (MoMLV, MMLV, MuLV, or MLV) or a Murine Stem cell Virus (MSCV) genome. In some embodiments, the lentiviral vector is derived from the human immunodeficiency virus (HIV) genome. In some embodiments, the viral vector is a chimeric viral vector. In some embodiments, the chimeric viral vector comprises viral portions from two or more viruses. In some embodiments, the viral vector corresponds to a virus of a specific serotype.

[0182] Often the viral vectors provided herein are an adeno-associated viral vector (AAV vector). In some embodiments, a viral particle that delivers a viral vector described herein is an AAV. In some embodiments, the AAV comprises any AAV known in the art. In some embodiments, the viral vector corresponds to a virus of a specific AAV serotype. In some embodiments, the AAV serotype is selected from an AAV1 serotype, an AAV2 serotype, AAV3 serotype, an AAV4 serotype, AAV5 serotype, an AAV6 serotype, AAV7 serotype, an AAV8 serotype, an AAV9 serotype, an AAV10 serotype, an AAV 11 serotype, an AAV12 serotype, an AAV-rh10 serotype, and any combination, derivative, or variant thereof. In some embodiments, the AAV vector is a recombinant vector, a hybrid AAV vector, a chimeric AAV vector, a self-complementary AAV (scAAV) vector, a single-stranded AAV, or any combination thereof scAAV genomes are generally known in the art and contain both DNA strands which can anneal together to form double-stranded DNA.

[0183] In some embodiments, an AAV vector described herein is a chimeric AAV vector. In some embodiments, the chimeric AAV vector comprises an exogenous amino acid or an amino acid substitution, or capsid proteins from two or more serotypes. In some examples, a chimeric AAV vector may be genetically engineered to increase transduction efficiency, selectivity, or a combination thereof.

[0184] Generally, an AAV vector has two inverted terminal repeats (ITRs). According, in some embodiments, the viral vector provided herein comprises two inverted terminal repeats of AAV. Typically, the length of each ITR is about 145 bp.

[0185] The DNA sequence in between the ITRs of an AAV vector provided herein may be referred to herein as the sequence encoding the genome editing tools. These genome editing tools can include, but are not limited to, an effector protein, effector protein modifications (e.g., nuclear localization signal (NLS), polyA tail), guide nucleic acid(s), respective promoter(s), and a donor nucleic acid, or combinations thereof. Accordingly, in some embodiments, a viral vector provided herein comprises at least one promoter that drives expression of the effector protein and at least one promoter that results in the transcription of nucleotides sequences that, when transcribed and/or cleaved by the effector protein, produce the guide nucleic acid for targeting the effector protein to the TRAC gene, the guide nucleic acid for targeting the effector protein to the B2M gene, the guide nucleic acid for targeting the effector protein to the CIITA gene, or a combination thereof. In some embodiments, a viral vector provided herein comprises a single promoter for producing a single RNA transcript containing two or more guide nucleic acids contained in the sequence encoding or producing the genome editing tools. For example, in some embodiments, a viral vector provided herein comprises a promoter that drives transcription of the nucleotide sequences that produce the guide nucleic acid for targeting the effector protein to the TRAC gene, the guide nucleic acid for targeting the effector protein to the B2M gene, and the guide nucleic acid for targeting the effector protein to the CIITA gene as a single RNA transcript. In such a viral vector, the sequence encoding the genome editing tools can further comprise a second promoter that drives expression of the effector protein. In some embodiments, a viral vector provided herein comprises a separate promoter for producing each of the guide nucleic acids contained in the sequence encoding the genome editing tools. Accordingly, in some embodiments, the viral vector provided herein comprises a first promoter that drives transcription of the nucleotide sequence that produces the guide nucleic acid for targeting the effector protein to the TRAC gene, a second promoter that drives transcription of the nucleotide sequence that produces the guide nucleic acid for targeting the effector protein to the B2M gene, and a third promoter that drives transcription of the nucleotide sequence that produces the guide nucleic acid for targeting the effector protein to the CIITA gene. In such a viral vector, the sequence encoding the genome editing tools can further comprise a fourth promoter that drives expression of the effector protein. In some embodiments, a viral vector provided herein comprises a promoter for producing two of the guide nucleic acids and a separate promoter for producing a third guide nucleic acid contained in the sequence encoding the genome editing tools. Accordingly, in some embodiments, the viral vector provided herein comprises a first promoter that drives transcription of the nucleotide sequence that produces the guide nucleic acid for targeting the effector protein to the TRAC gene and the guide nucleic acid for targeting the effector protein to the B2M gene, and a second promoter that drives transcription of the nucleotide sequence that produces the guide nucleic acid for targeting the effector protein to the CIITA gene. In some embodiments, the viral vector provided herein comprises a first promoter that drives transcription of the nucleotide sequence that produces the guide nucleic acid for targeting the effector protein to the TRAC gene and the guide nucleic acid for targeting the effector protein to the CIITA gene, and a second promoter that drives transcription of the nucleotide sequence that produces the guide nucleic acid for targeting the effector protein to the B2M gene. In some embodiments, the viral vector provided herein comprises a first promoter that drives transcription of the nucleotide sequence that produces the guide nucleic acid for targeting the effector protein to the B2M gene and the guide nucleic acid for targeting the effector protein to the CIITA gene, and a second promoter that drives transcription of the nucleotide sequence that produces the guide nucleic acid for targeting the effector protein to the TRAC gene.

[0186] In general, viral vectors provided herein comprise at least one promotor or a combination of promoters driving expression or transcription of one or more genome editing tools described herein. In some embodiments, the length of the promoter is less than about 500, less than about 400, or less than about 300 linked nucleotides. In some embodiments, the length of the promoter is at least 100 linked nucleotides.

[0187] In some embodiments, the length of the sequence encoding the genome editing tools (also referred to as the cloning capacity) between the ITRs is about 4 kb to about 5 kb. In some embodiments, the length of the sequence encoding the genome editing tools is about 4.2 kb to about 4.8 kb. In some embodiments, the length of the sequence encoding the genome editing tools is about 2 kb, about 2.1 kb, about 2.2 kb, about 2.3 kb, about 2.4 kb, about 2.5 kb, about 2.6 kb, about 2.7 kb, about 2.8 kb, about 2.9 kb, about 3.0 kb, about 3.1 kb, about 3.2 kb, about 3.3 kb, about 3.4 kb, about 3.5 kb, about 3.6 kb, about 3.7 kb, about 3.8 kb, about 3.9 kb, about 4.0 kb, about 4.1kb, about 4.2 kb, about 4.3 kb, about 4.4 kb, about 4.5 kb, about 4.6 kb, about 4.7 kb, about 4.8 kb, about 4.9 kb, or about 5 kb.

[0188] In some embodiments, the coding region of the AAV vector forms an intramolecular double-stranded DNA template thereby generating an AAV vector that is a self-complementary AAV (scAAV) vector. In general, the sequence encoding the genome editing tools of an scAAV vector has a length of about 2 kb to about 3 kb. In some embodiments, the length of the sequence encoding the genome editing tools of an scAAV vector is about 2kb, about 2.1 kb, about 2.2 kb, about 2.3 kb, about 2.4 kb, about 2.5 kb, about 2.6 kb, about 2.7 kb, or about 2.8 kb. The scAAV vector can comprise nucleotide sequences encoding an effector protein, providing guide nucleic acids described herein, and a donor nucleic acid described herein.

[0189] In some embodiments, the AAV vector provided herein is a self-inactivating AAV vector. A self-inactivating AAV vector provided herein comprises guide nucleic acids described herein, wherein the guide nucleic acids comprises a region that is complementary to the region of the AAV vector encoding the effector protein described herein. In some embodiments, the AAV vector comprises guide nucleic acids described herein that comprise a region that is complementary to sequences near the 5′ and 3′ ends of the region of the AAV vector encoding the effector protein, thereby allowing for the region of the AAV vector encoding the effector protein to be excised. Thus, the effector protein can control expression of itself. In some embodiments, the self-inactivating AAV vector limits the duration of expression of the effector protein, thereby limiting off-target effector protein activity and enabling safe genome editing. In some embodiments, the self-inactivating AAV vector is a self-inactivating scAAV vector.

[0190] In some embodiments, the plasmid encoding the scAAV vector provided herein comprises a nucleotide sequence encoding an effector protein having at least about 80%, 85%, 90%, 95%, 96%, 97%, 98%, 99% or 100% sequence identity to any one of the sequences recited in TABLE 1. In some embodiments, the plasmid encoding the scAAV vector provided herein comprises a nucleotide sequence encoding an effector protein having at least about 80%, 85%, 90%, 95%, 96%, 97%, 98%, or 99% sequence identity to SEQ ID NO: 2435. In some cases, the plasmid encoding the scAAV vector provided herein comprises a nucleotide sequence encoding an effector protein having the amino acid sequence of SEQ ID NO: 2435.

[0191] In some embodiments, an AAV vector provided herein comprises a modification, such as an insertion, deletion, chemical alteration, or synthetic modification, relative to a wild-type AAV vector. In some embodiments, the modification is in a protein coding region or a non-coding region of an AAV vector. In some embodiments, a modification improves the protein expression activity of the AAV vector. In some embodiments, an AAV vector provided herein is chimeric. In some embodiments, inverted terminal repeats of an AAV vector comprise a 5′ inverted terminal repeat, a 3′ inverted terminal repeat, and a mutated inverted terminal repeat. In some embodiments, a mutated inverted terminal repeat lacks a terminal resolution site. In some embodiments, an AAV vector provided herein comprises a modification in a capsid (CAP) or replication (REP) protein. In some embodiments, an AAV vector provided herein comprises any combination of REP, CAP, and ITR sequences from different AAV serotypes. In some embodiments, an AAV vector comprises a genome comprising a replication gene and inverted terminal repeats from a first AAV serotype and a capsid protein from a second AAV serotype. In some embodiments, an AAV vector comprises a genome consisting of a sequence encoding the genome editing tools described herein and inverted terminal repeats from an AAV, with no other AAV genes (e.g., genes encoding REP proteins or genes encoding CAP proteins).

[0192] In some embodiments, an AAV vector provided herein comprises a sequence encoding the genome editing tools that allows for the AAV vector to be packaged into a viral particle. Accordingly, in some embodiments, the sequence encoding the genome editing tools comprises or consists essentially of a nucleotide sequence encoding an effector protein, nucleotide sequences that produce guide nucleic acids for targeting the effector protein to the TRAC gene, the B2M gene and the CIITA gene, a first promoter driving the expression of the effector protein, one, two or three promoters driving expression of the guide nucleic acids, and a donor nucleic acid, wherein the effector protein is less than about 600 amino acids in length or a length as described herein, the nucleotide sequences producing the guide nucleic acids total about 100 to about 300 nucleotides in length, and wherein nucleotide sequence that comprises the donor nucleic acid is about 500 nucleotides to about 2,500 nucleotides in length.

### Producing AAV Delivery Vectors

[0193] In some embodiments, methods of producing AAV delivery vectors herein comprise packaging a nucleic acid encoding an effector protein and a guide nucleic acid, or a combination thereof, into an AAV vector. In some embodiments, methods of producing the delivery vector comprises, (a) contacting a cell with at least one nucleic acid encoding: (i) a guide nucleic acid; (ii) a Replication (Rep) gene; and (iii) a Capsid (Cap) gene that encodes an AAV capsid protein; (b) expressing the AAV capsid protein in the cell; (c) assembling an AAV particle; and (d) packaging an effector encoding nucleic acid into the AAV particle, thereby generating an AAV delivery vector. In some embodiments, promoters, stuffer sequences, and any combination thereof may be packaged in the AAV vector. In some examples, the AAV vector may package 1, 2, 3, 4, or 5 guide nucleic acids or copies thereof. In some embodiments, the AAV vector comprises inverted terminal repeats, e.g., a 5′ inverted terminal repeat and a 3′ inverted terminal repeat. In some embodiments, the AAV vector comprises a mutated inverted terminal repeat that lacks a terminal resolution site.

[0194] In some embodiments, a hybrid AAV vector is produced by transcapsidation, e.g., packaging an inverted terminal repeat (ITR) from a first serotype into a capsid of a second serotype, wherein the first and second serotypes may be not the same. In some examples, the Rep gene and ITR from a first AAV serotype (e.g., AAV2) may be used in a capsid from a second AAV serotype (e.g., AAV9), wherein the first and second AAV serotypes may be not the same. As a non-limiting example, a hybrid AAV serotype comprising the AAV2 ITRs and AAV9 capsid protein may be indicated AAV2/9. In some examples, the hybrid AAV delivery vector comprises an AAV2/1, AAV2/2, AAV 2/4, AAV2/5, AAV2/8, or AAV2/9 vector.

### Viral Particles

[0195] Disclosed herein, in some aspects, are viral particles comprising a viral vector described herein. Such viral particles are suitable for ex vivo transduction of a target cell as described herein (e.g., a T cell). Accordingly, in some embodiments, viral particles described herein are derived from a retrovirus, an adenovirus, an arenavirus, an alphavirus, an AAV, a baculovirus, a vaccinia virus, a herpes simplex virus or a poxvirus. Such viral particles provide the infective system of the virus from which it was derived in order to facilitate delivery of the viral vector into the target cell described herein.

[0196] In some embodiments, the viral particle that delivers the viral vector described herein is an AAV. AAVs are characterized by their serotype. Non-limiting examples of AAV serotypes are AAV1, AAV2, AAV3, AAV4, AAV5, AAV6, AAV7, AAV8, AAV9, AAV10, AAV11, AAV12, scAAV, AAV-rh10, chimeric or hybrid AAV, or any combination, derivative, or variant thereof. In some embodiments, the AAV serotype is AAV-DJ. AAV-DJ is a synthetic serotype with a chimeric capsid of AAV-2, 8 and 9 as further described by Grimm et al. (2008) J. Virol., 82(12):5887-911. In some embodiments, the AAV serotype is a AAV X-Vivo (AAV-XV) serotype, which is a combination of the VP1 unique (VP1u) and VP1/2-common region sequences of AAV6 with those from divergent AAV serotypes AAV4, AAV5, AAV 11, and AAV12 to create chimeric AAV6 vectors, as further described by Viney et al., (2021), J. Virol., 95(7):e02023-20, which is incorporated by reference in its entirety. Such AAV-XV particles show enhanced transduction of human primary T cells, and superior genomic integration of DNA sequences by AAV alone or in combination with CRISPR gene editing. Accordingly, in some embodiments, the viral particle described herein is an AAV-XV derived from chimeras of AAV12 VP1/2 sequences and the VP3 sequence of AAV6.

[0197] In some embodiments, an AAV particle provided herein is engineered or modified. In some embodiments, a modification comprises a deletion, insertion, mutation, substitution, or a combination thereof of the capsid protein, the rep protein, an ITR sequence, or other components of an AAV. In some embodiments, modifications to the AAV genome and/or the capsids/rep proteins can be designed to facilitate more efficient or more specific transduction of a cell described herein (e.g., T cell). In general, an AAV undergoes several steps prior to achieving gene expression: 1) binding or attachment to cellular surface receptors, 2) endocytosis, 3) trafficking to the nucleus, 4) uncoating of the virus to release the genome, and 5) conversion of the genome from single-stranded to double-stranded DNA as a template for transcription in the nucleus. In some embodiments, the cumulative efficiency with which an AAV can successfully execute each individual step can determine the overall transduction efficiency. In some embodiments, modifications of AAV can improve or modify the rate limiting steps in AAV transduction including the absence or low abundance of required cellular surface receptors for viral attachment and internalization, inefficient endosomal escape leading to lysosomal degradation, slow conversion of single-stranded to double-stranded DNA template, or a combination thereof.

[0198] In some embodiments, a viral particle described herein comprises an AAV viral capsid modified relative to a naturally occurring AAV viral capsid. In some embodiments, modifying an AAV viral capsid comprises modifying a combination of capsid components. In some embodiments, a mutated AAV virus particle comprises a mutation in at least one capsid protein. In some embodiments, the mutation is in VP1 and VP2, in VP1 and VP3, in VP2 and VP3, or in VP1, VP2, and VP3. In some embodiments, a VP is eliminated. A mutation can occur at any of AAV capsid positions described thereof and can include any number of mutations. In some embodiments, a mutation is from one amino acid to another amino acid. A mutation can comprise modifying an amino acid to any permutation of the canonical amino acids (e.g., relative to a wildtype capsid protein). Any of the following amino acid modifications can be made at any of VP1, VP2, and VP3: A to R, A to N, A to D, A to C, A to Q, A to E, A to G, A to H, A to I, A to L, A to K, A to M, A to F, A to P, A to S, A to T, A to W, A to Y, A to V, R to N, R to D, R to C, R to Q, R to E, R to G, R to H, R to I, R to L, R to K, R to M, R to F, R to P, R to S, R to T, R to W, R to Y, R to V, N to D, N to C, N to Q, N to E, N to G, N to H, N to I, N to L, N to K, N to M, N to F, N to P, N to S, N to T, N to W, N to Y, N to V, D to C, D to Q, D to E, D to G, D to H, D to I, D to L, D to K, D to M, D to F, D to P, D to S, D to T, D to W, D to Y, D to V, C to Q, C to E, C to G, C to H, C to I, C to L, C to K, C to M, C to F, C to P, C to S, C to T, C to W, C to Y, C to V, Q to E, Q to G, Q to H, Q to I, Q to L, Q to K, Q to M, Q to F, Q to P, Q to S, Q to T, Q to W, Q to Y, Q to V, E to G, E to H, E to I, E to L, E to K, E to M, E to F, E to P, E to S, E to T, E to W, E to Y, E to V, G to H, G to I, G to L, G to K, G to M, G to F, G to P, G to S, G to T, G to W, G to Y, G to V, H to I, H to L, H to K, H to M, H to F, H to P, H to S, H to T, H to W, H to Y, H to V, I to L, I to K, I to M, I to F, I to P, I to S, I to T, I to W, I to Y, I to V, L to K, L to M, L to F, L to P, L to S, L to T, L to W, L to Y, L to V, K to M, K to F, K to P, K to S, K to T, K to W, K to Y, K to V, M to F, M to P, M to S, M to T, M to W, M to Y, M to V, F to P, F to S, F to T, F to W, F to Y, F to V, P to S, P to T, P to W, P to Y, P to V, S to T, S to W, S to Y, S to V, T to W, T to Y, T to V, W to Y, W to V, Y to V, and any of the previously described mutations in reverse.

[0199] In some embodiments, a viral particle provided herein comprises a chimeric capsid. In some embodiments, a chimeric capsid comprises an insertion of a foreign protein sequence into the open reading frame of the capsid gene, either from another wild-type (wt) AAV sequence or an unrelated protein. In some embodiments, a chimeric capsid is produced using a naturally existing serotype as a template. In some embodiments, a chimeric capsid is produced using a serotype that is mutated relative to a wild type as a template. In some embodiments, a chimeric capsid can comprise at least one capsid polypeptide from an AAV serotype comprising AAV1, AAV2, AAV3, AAV4, AAV5, AAV6, AAV7, AAV8, AAV9, AAV10, AAV 11, or AAV12. In some embodiments, a viral vector provided herein comprises a polypeptide comprising a VP1 from an AAV serotype comprising AAV1, AAV2, AAV3, AAV4, AAV5, AAV6, AAV7, AAV8, AAV9, AAV10, AAV 11, or AAV12. In other embodiments, a viral vector provided herein comprises a polypeptide comprising a VP2 from an AAV comprising AAV1, AAV2, AAV3, AAV4, AAV5, AAV6, AAV7, AAV8, AAV9, AAV10, AAV 11, or AAV12. In some embodiments, a viral vector provided herein comprises a polypeptide comprising a VP3 from an AAV serotype comprising AAV1, AAV2, AAV3, AAV4, AAV5, AAV6, AAV7, AAV8, AAV9, AAV10, AAV11, or AAV12.

[0200] In some embodiments, the AAV particle described herein targets a cell. In some embodiments, the AAV particle is capable of transducing a particular cell type. In some embodiments, the cell is a blood cell. The blood cell can be a leukocyte. The leukocyte can be a T cell, or a particular type of T cell. According, in some embodiments, the AAV particle is capable of transducing a naïve T cell. In some embodiments, the AAV particle is capable of transducing a cytotoxic T cell. In some embodiments, the AAV particle is capable of transducing a helper T cell. Details of selecting an AAV vector based on the target cell are well known in the art and provided in, for example, Viney et al., (2021), J. Virol., 95(7):e02023-20, Mietzsch et al., (2021), J Virol. 95(19):e0077321 and Benskey et al., (2019), Methods Mol Biol., 1937:3-26, each of which is incorporated by reference in their entireties.

### Producing AAV Particles

[0201] The AAV particles described herein can be referred to as recombinant AAV (rAAV). Often, rAAV particles are generated by transfecting AAV producing cells with an AAV-containing plasmid carrying the sequence encoding the genome editing tools, a plasmid that carries viral encoding regions, i.e., Rep and Cap gene regions; and a plasmid that provides the helper genes such as E1A, E1B, E2A, E40RF6 and VA. In some embodiments, the AAV producing cells are mammalian cells. In some embodiments, host cells for rAAV viral particle production are mammalian cells. In some embodiments, a mammalian cell for rAAV viral particle production is a COS cell, a HEK293T cell, a HeLa cell, a KB cell, a derivative thereof, or a combination thereof. In some embodiments, rAAV virus particles can be produced in the mammalian cell culture system by providing the rAAV plasmid to the mammalian cell. In some embodiments, producing rAAV virus particles in a mammalian cell can comprise transfecting vectors that express the rep protein, the capsid protein, and the gene-of-interest expression construct flanked by the ITR sequence on the 5′ and 3′ ends. Methods of such processes are provided in, for example, Naso et al., BioDrugs, 2017 Aug; 31(4):317-334 and Benskey et al., (2019), Methods Mol Biol., 1937:3-26, each of which is incorporated by reference in their entireties.

[0202] In some embodiments, rAAV is produced in a non-mammalian cell. In some embodiments, rAAV is produced in an insect cell. In some embodiments, an insect cell for producing rAAV viral particles comprises a Sf9 cell. In some embodiments, production of rAAV virus particles in insect cells can comprise baculovirus. In some embodiments, production of rAAV virus particles in insect cells can comprise infecting the insect cells with three recombinant baculoviruses, one carrying the cap gene, one carrying the rep gene, and one carrying the gene-of-interest expression construct enclosed by an ITR on both the 5′ and 3′ end. In some embodiments, rAAV virus particles are produced by the One Bac system. In some embodiments, rAAV virus particles can be produced by the Two Bac system. In some embodiments, in the Two Bac system, the rep gene and the cap gene of the AAV is integrated into one baculovirus virus genome, and the ITR sequence and the gene-of-interest expression construct is integrated into another baculovirus virus genome. In some embodiments, in the One Bac system, an insect cell line that expresses both the rep protein and the capsid protein is established and infected with a baculovirus virus integrated with the ITR sequence and the gene-of-interest expression construct. Details of such processes are provided in, for example, Smith et. al., (1983), Mol. Cell. Biol., 3(12):2156-65; Urabe et al., (2002), Hum. Gene. Ther., 1; 13(16):1935-43; and Benskey et al., (2019), Methods Mol Biol., 1937:3-26, each of which is incorporated by reference in its entirety.

### Effector Proteins

[0203] Provided herein are vectors encoding an effector protein or methods that use an effector protein. In some embodiments, an effector protein provided herein interacts with a guide nucleic acid to form a complex. In some embodiments, an interaction between the complex and a target nucleic acid comprises one or more of: recognition of a protospacer adjacent motif (PAM) sequence within the target nucleic acid by the effector protein, hybridization of the guide nucleic acid to the target nucleic acid, modification of the target nucleic acid by the effector protein, or combinations thereof. In some embodiments, recognition of a PAM sequence within a target nucleic acid may direct the modification activity of an effector protein. In some embodiments, recognition of a PAM sequence adjacent to a target nucleic acid may direct the modification activity of an effector protein.

[0204] Modification activity of an effector protein or an engineered protein described herein may be cleavage activity, binding activity, insertion activity, substitution activity, and the like. Modification activity of an effector protein may result in: cleavage of at least one strand of a target nucleic acid, deletion of one or more nucleotides of a target nucleic acid, insertion of one or more nucleotides into a target nucleic acid, substitution of one or more nucleotides of a target nucleic acid with an alternative nucleotide, more than one of the foregoing, or any combination thereof. In some embodiments, an ability of an effector protein to edit a target nucleic acid may depend upon the effector protein being complexed with a guide nucleic acid, the guide nucleic acid being hybridized to a target sequence of the target nucleic acid, the distance between the target sequence and a PAM sequence, or combinations thereof. A target nucleic acid comprises a target strand and a non-target strand. Accordingly, in some embodiments, the effector protein may edit a target strand and/or a non-target strand of a target nucleic acid.

[0205] The modification of the target nucleic acid generated by an effector protein may, as a non-limiting example, result in modulation of the expression of the target nucleic acid (e.g., increasing or decreasing expression of the nucleic acid) or modulation of the activity of a translation product of the target nucleic acid (e.g., inactivation of a protein binding to an RNA molecule or hybridization). Accordingly, in some embodiments, provided herein are methods of editing a target nucleic acid using an effector protein of the present disclosure, or compositions or systems thereof. Also provided herein are methods of modulating expression of a target nucleic acid using an effector protein of the present disclosure, or compositions or systems thereof. Further provided herein are methods of modulating the activity of a translation product of a target nucleic acid using an effector protein of the present disclosure, or compositions or systems thereof.

[0206] In some embodiments, the complex interacts with a target nucleic acid In some embodiments, the vectors comprise viral vectors or nonviral vectors. Accordingly, provided herein are viral vectors encoding an effector protein or methods that use an effector protein. In general, the effector protein is a Cas effector protein. The effector proteins can be small, which are beneficial for nucleic acid editing. The small nature of these effector proteins allow for them to be more easily packaged and delivered with higher efficiency in the context of genome editing.

[0207] In some embodiments, the length of the effector protein is at least about 300, at least about 350, at least about 400, at least about 450 linked amino acids. In some embodiments, the length of the effector protein is at least 400 linked amino acid residues. In some embodiments, the length of the effector protein is less than less than about 400, less than about 450, less than about 500, less than about 550, less than about 600 linked amino acid residues.

[0208] In some embodiments, the length of the effector protein is about 300 to about 600 linked amino acid residues. In some embodiments, the length of the effector protein is about 400 to about 600 linked amino acid residues. In some embodiments, the length of the effector protein is about 450 to about 550 linked amino acids. In some embodiments, the length of the effector protein is about 420 to about 480 linked amino acids. In some embodiments, the length of the effector protein is about 400 to about 420, about 420 to about 440, about 440 to about 460, about 460 to about 480, about 480 to about 500, about 500 to about 520, about 520 to about 540, about 540 to about 560, about 560 to about 580, about 580 to about 600 linked amino acids.

[0209] In some embodiments, the effector protein is a Type V Cas protein. In some embodiments, the effector protein is a Type VI Cas protein. In general, a Type V Cas effector protein comprises a RuvC domain but lacks an HNH domain. In some embodiments, the RuvC domain of the Type V Cas effector protein comprises three RuvC subdomains. In some embodiments, the three RuvC subdomains are located within the C-terminal half of the Type V Cas effector protein. In some embodiments, none of the RuvC subdomains are located at the N terminus of the protein. In some embodiments, the RuvC subdomains are contiguous. In some embodiments, there are zero to about 50 amino acids between the first and second RuvC subdomains. In some embodiments, there are zero to about 50 amino acids between the second and third RuvC subdomains.

[0210] In some embodiments, the effector proteins comprise a RuvC domain (e.g., a partial RuvC domain). In some embodiments, the RuvC domain can be defined by a single, contiguous sequence, or a set of partial RuvC domains that are not contiguous with respect to the primary amino acid sequence of the protein. An effector protein of the present disclosure can include multiple partial RuvC domains, which can combine to generate a RuvC domain with substrate binding or catalytic activity. For example, an effector protein can include three partial RuvC domains (RuvC-I, RuvC-II, and RuvC-III, also referred to herein as subdomains) that are not contiguous with respect to the primary amino acid sequence of the effector protein, but form a RuvC domain once the protein is produced and folds. In some embodiments, effector proteins comprise a recognition domain with a binding affinity for a guide nucleic acid or for a guide nucleic acid-target nucleic acid heteroduplex. In some embodiments, the effector protein does not comprise a zinc finger domain. In some embodiments, the effector protein does not comprise an HNH domain.

[0211] In some embodiments, the effector protein is a Cas14 effector protein. In some embodiments, the effector protein is a Cas12 effector protein. In some embodiments, the effector protein is a CasΦ effector protein described herein. In some embodiments, the effector protein is a CasM effector described herein. In some embodiments, the Cas12 effector is a Cas12a, Cas12b, Cas12c, Cas12d, a Cas12e or a Cas12j effector. In some embodiments, the effector protein is a Cas 13 effector. In some embodiments, the Cas13 effector is a Cas13a, a Cas13b, a Cas 13c or a Cas 13d effector.

[0212] Provided herein, in some embodiments, are viral vectors that comprise a nucleotide sequence encoding an effector protein. Also provided herein, in some embodiments, are methods that use an effector protein. TABLE 1 provides illustrative amino acid sequences of effector proteins for the viral vectors and methods described herein. In some embodiments, the effector protein comprises an amino acid sequence that is at least 65%, at least 70%, at least 75%, at least 80%, at least 85%, at least 90%, at least 95%, at least 97%, or at least 98%, at least 99%, or 100% identical to any one of the sequences recited in TABLE 1. In some embodiments, an effector protein provided herein comprises an amino acid sequence that is at least 65% identical to any one of the sequences as set forth in TABLE 1. In some embodiments, an effector protein provided herein comprises an amino acid sequence that is at least 70% identical to any one of the sequences as set forth in TABLE 1. In some embodiments, an effector protein provided herein comprises an amino acid sequence that is at least 75% identical to any one of the sequences as set forth in TABLE 1. In some embodiments, an effector protein provided herein comprises an amino acid sequence that is at least 80% identical to any one of the sequences as set forth in TABLE 1. In some embodiments, an effector protein provided herein comprises an amino acid sequence that is at least 85% identical to any one of the sequences as set forth in TABLE 1. In some embodiments, an effector protein provided herein comprises an amino acid sequence that is at least 90% identical to any one of the sequences as set forth in TABLE 1. In some embodiments, an effector protein provided herein comprises an amino acid sequence that is at least 95% identical to any one of the sequences as set forth in TABLE 1. In some embodiments, an effector protein provided herein comprises an amino acid sequence that is at least 97% identical to any one of the sequences as set forth in TABLE 1. In some embodiments, an effector protein provided herein comprises an amino acid sequence that is at least 98% identical to any one of the sequences as set forth in TABLE 1. In some embodiments, an effector protein provided herein comprises an amino acid sequence that is at least 99% identical to any one of the sequences as set forth in TABLE 1. In some embodiments, an effector protein provided herein comprises an amino acid sequence that is identical to any one of the sequences as set forth in TABLE 1.

[0213] In some embodiments, compositions, systems and methods described herein comprise an effector protein, or a nucleic acid encoding the effector protein, wherein the amino acid sequence of the effector protein comprises at least about 200 contiguous amino acids or more of any one of the sequences recited in TABLE 1. In some embodiments, the amino acid sequence of an effector protein provided herein comprises at least about 200, at least about 220, at least about 240, at least about 260, at least about 280, at least about 300, at least about 320, at least about 340, at least about 360, at least about 380, at least about 400 contiguous amino acids, at least about 420 contiguous amino acids, at least about 440 contiguous amino acids, at least about 460 contiguous amino acids, at least about 480 contiguous amino acids, at least about 500 contiguous amino acids, at least about 520 contiguous amino acids, at least about 540 contiguous amino acids, at least about 560 contiguous amino acids, at least about 580 contiguous amino acids, at least about 600 contiguous amino acids, at least about 620 contiguous amino acids, at least about 640 contiguous amino acids, at least about 660 contiguous amino acids, at least about 680 contiguous amino acids, at least about 700 contiguous amino acids, or more of any one of the sequences of TABLE 1.

[0214] In some embodiments, compositions, systems and methods described herein comprise an effector protein or a nucleic acid encoding the effector protein, wherein the effector protein comprises a portion of any one of the sequences recited in TABLE 1. In some embodiments, the effector protein comprises a portion of any one of the sequences recited in TABLE 1, wherein the portion does not comprise at least the first 10 amino acids, at least the first 20 amino acids, at least the first 40 amino acids, at least the first 60 amino acids, at least the first 80 amino acids, at least the first 100 amino acids, at least the first 120 amino acids, at least the first 140 amino acids, at least the first 160 amino acids, at least the first 180 amino acids, or at least the first 200 amino acids of any one of the sequences recited in TABLE 1. In some embodiments, the effector protein comprises a portion of any one of the sequences recited in TABLE 1, wherein the portion does not comprise the last 10 amino acids, the last 20 amino acids, the last 40 amino acids, the last 60 amino acids, the last 80 amino acids, the last 100 amino acids, the last 120 amino acids, the last 140 amino acids, the last 160 amino acids, the last 180 amino acids, or the last 200 amino acids of any one of the sequences recited in TABLE 1.

[0215] In some embodiments, the effector protein comprises an amino acid sequence is at least 65%, at least 70%, at least 75%, at least 80%, at least 85%, at least 90%, at least 95%, at least 97%, or at least 98%, at least 99%, or 100% identical to any one of SEQ ID NOs: 1-203, 2435, 2592, 2599 and 2601. In some embodiments, the effector protein comprises an amino acid sequence that has at least about 85% sequence identity to a sequence selected from the group consisting of SEQ ID NOs: 1-45, 2435, 2599 and 2601. In some embodiments, the effector protein comprises an amino acid sequence that has at least about 90% sequence identity to a sequence selected from the group consisting of SEQ ID NOs: 1-45, 2435, 2599 and 2601. In some embodiments, the effector protein comprises an amino acid sequence that has at least about 95% sequence identity to a sequence selected from the group consisting of SEQ ID NOs: 1-45, 2435, 2599 and 2601. In some embodiments, the effector protein comprises an amino acid sequence that has at least about 98% sequence identity to a sequence selected from the group consisting of SEQ ID NOs: 1-45, 2435, 2599 and 2601. In some embodiments, the effector protein comprises an amino acid sequence that has at least about 99% sequence identity to a sequence selected from the group consisting of SEQ ID NOs: 1-45, 2435, 2599 and 2601. In some embodiments, the effector protein comprises an amino acid sequence that is identical to a sequence selected from the group consisting of SEQ ID NOs: 1-45, 2435, 2599 and 2601. In some embodiments, the effector protein comprises an amino acid sequence that has at least about 85% sequence identity to a sequence selected from the group consisting of SEQ ID NOs: 46-94 and 2592. In some embodiments, the effector protein comprises an amino acid sequence that has at least about 90% sequence identity to a sequence selected from the group consisting of SEQ ID NOs: 46-94 and 2592. In some embodiments, the effector protein comprises an amino acid sequence that has at least about 95% sequence identity to a sequence selected from the group consisting of SEQ ID NOs: 46-94 and 2592. In some embodiments, the effector protein comprises an amino acid sequence that has at least about 98% sequence identity to a sequence selected from the group consisting of SEQ ID NOs: 46-94 and 2592. In some embodiments, the effector protein comprises an amino acid sequence that has at least about 99% sequence identity to a sequence selected from the group consisting of SEQ ID NOs: 46-94 and 2592. In some embodiments, the effector protein comprises an amino acid sequence that is identical to a sequence selected from the group consisting of SEQ ID NOs: 46-94 and 2592. In some embodiments, the effector protein comprises an amino acid sequence that has at least about 85%, at least about 90%, at least about 95%, at least about 98%, at least about 99% sequence identity, or is identical, to a sequence selected from the group consisting of SEQ ID NOs: 95-203.

[0216] In some embodiments, compositions, systems, and methods described herein comprise an effector protein, or a nucleic acid encoding the effector protein, wherein the effector protein comprises an amino acid sequence that is at least 80%, at least 85%, at least 90%, at least 95%, at least 97%, at least 98%, at least 99%, or 100% similar to any one of the sequences as set forth in TABLE 1. In some embodiments, an effector protein provided herein comprises an amino acid sequence that is at least 80% similar to any one of the sequences as set forth in TABLE 1. In some embodiments, an effector protein provided herein comprises an amino acid sequence that is at least 85% similar to any one of the sequences as set forth in TABLE 1. In some embodiments, an effector protein provided herein comprises an amino acid sequence that is at least 90% identical to any one of the sequences as set forth in TABLE 1. In some embodiments, an effector protein provided herein comprises an amino acid sequence that is at least 95% similar to any one of the sequences as set forth in TABLE 1. In some embodiments, an effector protein provided herein comprises an amino acid sequence that is at least 97% similar to any one of the sequences as set forth in TABLE 1. In some embodiments, an effector protein provided herein comprises an amino acid sequence that is at least 98% identical to any one of the sequences as set forth in TABLE 1. In some embodiments, an effector protein provided herein comprises an amino acid sequence that is at least 99% similar to any one of the sequences as set forth in TABLE 1. In some embodiments, an effector protein provided herein comprises an amino acid sequence that is 100% similar to any one of the sequences as set forth in TABLE 1.

[0217] In some embodiments, when describing a certain percent (%) similarity in the context of an amino acid sequence, reference may be made to a value that is calculated by dividing a similarity score by the length of the alignment. In some embodiments, the similarity of two amino acid sequences can be calculated by using a BLOSUM62 similarity matrix (Henikoff and Henikoff, Proc. Natl. Acad. Sci. USA., 89:10915-10919 (1992)) that is transformed so that any value ≥1 is replaced with +1 and any value ≤0 is replaced with 0. For example, an Ile (I) to Leu (L) substitution is scored at +2.0 by the BLOSUM62 similarity matrix, which in the transformed matrix is scored at +1. This transformation allows the calculation of percent similarity, rather than a similarity score. Alternately, in some embodiments, when comparing two full protein sequences, the proteins can be aligned using pairwise MUSCLE alignment. Then, the % similarity can be scored at each residue and divided by the length of the alignment. For determining % similarity over a protein domain or motif, a multilevel consensus sequence (or PROSITE motif sequence) can be used to identify how strongly each domain or motif is conserved. In calculating the similarity of a domain or motif, the second and third levels of the multilevel sequence are treated as equivalent to the top level. Additionally, in some embodiments, if a substitution could be treated as conservative with any of the amino acids in that position of the multilevel consensus sequence, +1 point is assigned. For example, given the multilevel consensus sequence: RLG and YCK, the test sequence QIQ would receive three points. This is because in the transformed BLOSUM62 matrix, each combination is scored as: Q-R: +1; Q-Y: +0; I-L: +1; I-C: +0; Q-G: +0; Q-K: +1. For each position, the highest score is used when calculating similarity. In some embodiments, the % similarity can also be calculated using commercially available programs, such as the Geneious Prime software given the parameters matrix =BLOSUM62 and threshold ≥1.

[0218] In some embodiments, compositions, systems, and methods described herein comprise an effector protein, or a nucleic acid encoding the effector protein, wherein the effector protein comprises one or more amino acid alterations relative to any one of the sequences recited in TABLE 1. In some embodiments, the effector protein comprising one or more amino acid alterations is a variant of an effector protein described herein. It is understood that any reference to an effector protein herein also refers to an effector protein variant as described herein. In some embodiments, the one or more amino acid alterations comprises conservative substitutions, non-conservative substitutions, conservative deletions, non-conservative deletions, or combinations thereof. In some embodiments, an effector protein or a nucleic acid encoding the effector protein comprises 1 amino acid alteration, 2 amino acid alterations, 3 amino acid alterations, 4 amino acid alterations, 5 amino acid alterations, 6 amino acid alterations, 7 amino acid alterations, 8 amino acid alterations, 9 amino acid alterations, 10 amino acid alterations or more relative to any one of the sequences recited in TABLE 1.

[0219] Effector proteins disclosed herein can function as an endonuclease that catalyzes cleavage at a specific position (e.g., at a specific nucleotide within a target sequence) in a target nucleic acid. The target nucleic acid can be single stranded RNA (ssRNA), double stranded DNA (dsDNA) or single-stranded DNA (ssDNA). In some embodiments, the target nucleic acid is single-stranded DNA. In some embodiments, the target nucleic acid is single-stranded RNA. The effector proteins can provide cis cleavage activity, trans cleavage activity, nickase activity, or a combination thereof. Cis cleavage activity is cleavage of a target nucleic acid that is hybridized to a guide nucleic acid (e.g., a dual gRNA or a sgRNA), wherein cleavage occurs within or directly adjacent to the region of the target nucleic acid that is hybridized to guide nucleic acid. Trans cleavage activity is cleavage of ssDNA or ssRNA that is near, but not hybridized to the guide nucleic acid. Trans cleavage activity is triggered by the hybridization of the guide nucleic acid to the target nucleic acid. Nickase activity is a selective cleavage of one strand of a dsDNA.

### Engineered Proteins

[0220] In some embodiments, effector proteins disclosed herein are engineered proteins. Engineered proteins are not identical to a naturally-occurring protein. Such an engineered protein can include one or more mutations, including an insertion, deletion or substitution (e.g., conservative or non-conservative substitution). An engineered protein, in some embodiments, includes at least one mutation relative to a reference protein (e.g., a naturally-occurring protein). In some embodiments, an engineered protein includes at least 1, at least 2, at least 3, at least 4, at least 5, at least 6, at least 7, at least 8, at least 9, at least 10, at least 15, at least 20, at least 25 or at least 30 mutations relative to a reference protein (e.g., a naturally-occurring protein). In some embodiments, an engineered protein includes no more than 10, 20, 30, 40, or 50 mutations relative to a reference protein (e.g., a naturally-occurring protein). Engineered proteins may not comprise an amino acid sequence that is identical to that of a naturally-occurring protein. In some embodiments, the amino acid sequence of an engineered protein is not identical to that of a naturally occurring protein. Engineered proteins may provide an increased activity relative to a naturally occurring protein. Engineered proteins may provide a reduced activity relative to a naturally occurring protein. The activity may be nuclease activity. The activity may be nickase activity. The activity may be nucleic acid binding activity. Accordingly, in some embodiments, engineered proteins may provide enhanced activity (e.g., enhanced binding of a guide nucleic acid, and/or target nucleic acid, enhanced nuclease activity, enhanced nickase activity, etc.) as compared to a naturally-occurring counterpart. In such embodiments, the effector protein may have a 1%, 5%, 10%, 20%, 30%, 40%, 50%, 60%, 70%, 80%, 90%, 100%, 120%, 140%, 160%, 180%, 200%, or more, increased activity relative to a naturally-occurring counterpart. Alternatively, in some embodiments, engineered proteins may provide reduced activity (e.g., reduced binding of a guide nucleic acid, and/or target nucleic acid, reduced nuclease activity, reduced nickase activity, etc.) relative to a naturally occurring effector protein. In such embodiments, the engineered proteins may have a 100%, 90%, 80%, 70%, 60%, 50%, 40%, 30%, 20%, 10%, 5%, 1%, or less, decreased activity relative to a naturally occurring counterpart.

[0221] In some embodiments, effector proteins disclosed herein are engineered proteins. Engineered proteins are not identical to a naturally occurring protein. Engineered proteins can provide enhanced nuclease or nickase activity as compared to a naturally occurring nuclease or nickase. Effector proteins may provide enhanced nucleic acid binding activity (e.g., enhanced binding of a guide nucleic acid, and/or target nucleic acid) as compared to a naturally-occurring counterpart. An effector protein may have a 1%, 5%, 10%, 20%, 30%, 40%, 50%, 60%, 70%, 80%, 90%, 100%, 120%, 140%, 160%, 180%, 200%, or more, increase of the activity (e.g., nuclease activity, nickase activity, binding activity) of a naturally-occurring counterpart. An engineered protein can comprise a modified form of a wildtype counterpart protein.

[0222] In some embodiments, effector proteins comprise at least one amino acid change (e.g., deletion, insertion, or substitution) that reduces the nucleic acid-cleaving activity of the effector protein relative to the wildtype counterpart. For example, a nuclease domain (e.g., RuvC domain) of an effector protein can be deleted or mutated relative to a wildtype counterpart effector protein so that it is no longer functional or comprises reduced nuclease activity. The effector protein can have less than 90%, less than 80%, less than 70%, less than 60%, less than 50%, less than 40%, less than 30%, less than 20%, less than 10%, less than 5%, or less than 1% of the nucleic acid-cleaving activity of the wild-type counterpart. Engineered proteins can have no substantial nucleic acid-cleaving activity. Engineered proteins can be enzymatically inactive or “dead,” that is it can bind to a nucleic acid but not cleave it. An enzymatically inactive protein can comprise an enzymatically inactive domain (e.g. inactive nuclease domain). Enzymatically inactive can refer to an activity less than 1%, less than 2%, less than 3%, less than 4%, less than 5%, less than 6%, less than 7%, less than 8%, less than 9%, or less than 10% activity compared to the wild-type counterpart. A dead protein can associate with a guide nucleic acid to activate or repress transcription of a target nucleic acid sequence. In some embodiments, the enzymatically inactive protein is fused with a protein comprising recombinase activity.

[0223] In some embodiments, effector proteins comprise at least one amino acid change (e.g., deletion, insertion, or substitution) that increases the nucleic acid-cleaving activity of the effector protein relative to the wildtype counterpart. The effector protein can provide at least about 20%, at least about 30%, at least about 40%, at least about 50% at least about 60%, at least about 70%, at least about 80%, at least about 90%, or about 100% more nucleic acid-cleaving activity relative to that of the wild-type counterpart. The effector protein can provide at least about 2 fold, at least about 3 fold, at least about 4 fold, at least about 5 fold, at least about 6 fold, at least about 7 fold, at least about 8 fold, at least about 9 fold or at least about 10 fold more nucleic acid-cleaving activity relative to that of the wild-type counterpart.

[0224] In some embodiments, the effector protein or corresponding mRNA comprises an NLS and/or a polyA tail, respectively. An NLS is a sequence that tags a protein for import into the cell nucleus. There are many NLS described in the art. The length of the NLS can be about 5 to about 100 amino acids. The length of the NLS can be about 10 amino acids to about 20, about 30, about 40, about 50, or about 60 amino acids. The NLS can be located at the 5′ end of the effector protein. The NLS can be located at the 3′ end of the effector protein. The NLS can be located at an internal site of the effector protein (e.g., between the 5′ and 3′ end of the effector protein, but not at the 5′ or 3′ end of the effector protein). In general, the viral vector encodes an mRNA that is translated into the effector protein. In some embodiments, the mRNA comprises a polyA tail. This can increase the stability of the effector protein mRNA, thereby increasing production of Cas effector protein.

### Fusion Proteins

[0225] In some embodiments, a viral vector described herein comprises a nucleotide sequence that encodes an effector protein or a method described herein uses an effector protein, wherein the effector protein is a fusion protein. Such an effector protein can comprise a Cas effector protein and a fusion partner protein. A fusion partner protein is also simply referred to herein as a fusion partner. The fusion partner can comprise a protein or a functional domain thereof. Non-limiting examples of fusion partners include a protein having enzymatic activity that modifies a target nucleic acid and a signaling peptide, e.g., a nuclear localization signal (NLS). Accordingly, in some embodiments, fusion partners provide enzymatic activity that modifies a target nucleic acid. Such enzymatic activities include, but are not limited to, nuclease activity, DNA repair activity, DNA damage activity, integrase activity, transposase activity, recombinase activity, polymerase activity, ligase activity, and helicase activity. In some embodiments, the fusion partner comprises an RNA splicing factor. In some embodiments, any of the effector protein of the present disclosure (e.g., any of the effector proteins of TABLE 1 or fragments or variants thereof) can include a nuclear localization signal (NLS). In some cases, one or more NLS are fused or linked to the N-terminus of the effector protein. In some embodiments, one or more NLS are fused or linked to the C-terminus of the effector protein. In some embodiments, one or more NLS are fused or linked to the N-terminus and the C-terminus of the effector protein.

[0226] In some embodiments, an effector protein described herein comprises 1, 2, 3, 4, 5, 6, 7, 8, 9, 10, or more NLS at or near the N-terminus, 1, 2, 3, 4, 5, 6, 7, 8, 9, 10, or more NLS at or near the C-terminus, or a combination of these (e.g., one or more NLS at the amino-terminus and one or more NLS at the carboxy terminus). When more than one NLS is present, each may be selected independently of the others, such that a single NLS may be present in more than one copy and/or in combination with one or more other NLS present in one or more copies. In some embodiments, a NLS is considered near the N- or C-terminus when the nearest amino acid of the NLS is within about 1, 2, 3, 4, 5, 10, 15, 20, 25, 30, 40, 50, or more amino acids along the polypeptide chain from the N- or C-terminus.

[0227] In some embodiments, a NLS described herein comprises a heterologous polypeptide sequence recited in TABLE 1.1. In some embodiments, effector proteins described herein comprise an amino acid sequence that is at least about 65%, at least about 70%, at least about 75%, at least about 80%, at least about 85%, at least about 90%, at least about 95%, at least about 97%, at least about 98%, at least about 99%, or about 100% identical to any one of the sequences recited in TABLE 1 and further comprises one or more of the sequences set forth in TABLE 1.1. In some embodiments, a heterologous peptide described herein may be a fusion partner as described en supra.

[0228] In some embodiments, the link between the NLS and the effector protein comprises a tag. In some cases, said NLS can have a sequence of KRPAATKKAGQAKKKKEF (SEQ ID NO: 1584). The NLS can be selected to match the cell type of interest, for example several NLSs are known to be functional in different types of eukaryotic cell e.g. in mammalian cells. Suitable NLSs include the SV40 large T antigen NLS (PKKKRKV, SEQ ID NO: 1585) and the c-Myc NLS (PAAKRVKLD, SEQ ID NO: 1586). In some embodiments, an NLS can be the SV40 large T antigen NLS or the c-Myc NLS. NLSs that are functional in plant cells are described in Chang et al., (Plant Signal Behav. 2013 October; 8(10):e25976). In some embodiments, the nucleoplasmin NLS (KRPAATKKAGQAKKKKEF (SEQ ID NO: 1584)) is linked or fused to the C-terminus of the effector protein. In some embodiments, the SV40 NLS (PKKKRKVGIHGVPAA) (SEQ ID NO: 1587) is linked or fused to the N-terminus of the effector protein. In some embodiments, the nucleoplasmin NLS (SEQ ID NO: 1584) is linked or fused to the C-terminus of the programmable CasΦ nuclease and the SV40 NLS (SEQ ID NO: 1587) is linked or fused to the N-terminus of the effector protein.

### Multimeric Complexes

[0229] In some embodiments, viral vectors described herein comprise a nucleotide sequence that encodes an effector protein or methods described herein use an effector protein, wherein the effector protein forms a multimeric complex with another protein. In general, a multimeric complex comprises multiple proteins that non-covalently interact with one another. In some embodiments, the multimeric complex comprises a first effector protein and a second effector protein, wherein the first effector protein and the second effector protein are the same. In some embodiments, the multimeric complex comprises a first effector protein and a second effector protein, wherein the first effector protein and the second effector protein are different. A multimeric complex can comprise enhanced activity relative to the activity of any one of its effector proteins alone. For example, a multimeric complex comprising two effector proteins can comprise greater nucleic acid binding affinity, cis cleavage activity, and/or trans cleavage activity, than that of either of the effector proteins provided in monomeric form. A multimeric complex can have an affinity for a target region of a target nucleic acid and is capable of catalytic activity (e.g., cleaving, nicking or modifying the nucleic acid) at or near the target region. Multimeric complexes can be activated when complexed with a guide nucleic acid. Multimeric complexes can be activated when complexed with a guide nucleic acid and a target nucleic acid. In some embodiments, the multimeric complex cleaves the target nucleic acid. In some embodiments, the multimeric complex nicks the target nucleic acid.

[0230] In some embodiments, multimeric complexes comprise at least one effector protein comprising an amino acid sequence with at least 65%, at least 70%, at least 75%, at least 80%, at least 85%, at least 90%, at least 95% or 100% identity to any one of the sequences of TABLE 1. In some embodiments, the multimeric complex is a dimer comprising two effector proteins of identical amino acid sequences. In some embodiments, the multimeric complex comprises a first effector protein and a second effector protein, wherein the amino acid sequence of the first effector protein is at least 90%, at least 92%, at least 94%, at least 96%, at least 98% identical, or at least 99% identical to the amino acid sequence of the second effector protein.

[0231] In some embodiments, the multimeric complex is a heterodimeric complex comprising at least two effector proteins of different amino acid sequences. In some embodiments, the multimeric complex is a heterodimeric complex comprising a first effector protein and a second effector protein, wherein the amino acid sequence of the first effector protein is less than 90%, less than 85%, less than 80%, less than 75%, less than 70%, less than 65%, less than 60%, less than 55%, less than 50%, less than 45%, less than 40%, less than 35%, less than 30%, less than 25%, less than 20%, less than 15%, or less than 10% identical to the amino acid sequence of the second effector protein.

[0232] In some embodiments, a multimeric complex comprises at least two effector proteins. In some embodiments, a multimeric complex comprises more than two effector proteins. In some embodiments, a multimeric complex comprises two, three or four effector proteins. In some embodiments, at least one effector protein of the multimeric complex comprises an amino acid sequence with at least 65%, at least 70%, at least 75%, at least 80%, at least 85%, at least 90%, at least 95% or 100% identity to any one of the sequences of TABLE 1. In some embodiments, each effector protein of the multimeric complex independently comprises an amino acid sequence with at least 65%, at least 70%, at least 75%, at least 80%, at least 85%, at least 90%, at least 95% or 100% identity to any one of the sequences of TABLE 1.

[0233] Effector proteins disclosed herein can also function as an endonuclease for the production of a guide nucleic acid. Accordingly, in some embodiments, an effector protein or a multimeric complex thereof cleaves a precursor crRNA (“pre-crRNA”) to produce a guide RNA, also referred to as a “mature guide RNA.” For example, when a vector (e.g., viral vector or non-viral vector) described herein includes a promoter that produces the guide nucleic acid for targeting the effector protein to the TRAC gene, the B2M gene and the CIITA gene in the same RNA transcript, the effector protein can process the RNA transcript to generate the individual guide nucleic acids for targeting the effector protein to the TRAC gene, the B2M gene and the CIITA gene. Alternatively, if the vector (e.g., viral vector or non-viral vector) is RNA, the nucleotide sequences for producing the guide nucleic acids can be considered a pre-crRNA, which can result in a guide nucleic acid when cleaved by an effector protein. An effector protein that cleaves pre-crRNA to produce a mature guide RNA is said to have pre-crRNA processing activity. In some embodiments, a repeat region of a guide RNA comprises mutations or truncations relative to respective regions in a corresponding pre-crRNA.

### Protospacer Adjacent Motif (Pam) Sequences

[0234] Effector proteins of the present disclosure may cleave or nick a target nucleic acid within or near a protospacer adjacent motif (PAM) sequence of the target nucleic acid. In some embodiments, the target nucleic acid is a double stranded nucleic acid comprising a target strand and a non-target strand. In some embodiments, cleavage occurs within 1, 2, 3, 4, 5, 6, 7, 8, 9, 10, 15, 20, 25, 30, 35, 40, 45, or 50 nucleotides of a 5′ or 3′ terminus of a PAM sequence. In some embodiments, effector proteins described herein recognize a PAM sequence. In some embodiments, recognizing a PAM sequence comprises interacting with a sequence adjacent to the PAM. In some embodiments, a target nucleic acid comprises a target sequence that is adjacent to a PAM sequence. In some embodiments, the effector protein does not require a PAM to bind and/or cleave a target nucleic acid.

[0235] In some embodiments, a target nucleic acid is a single stranded target nucleic acid comprising a target sequence. Accordingly, in some embodiments, the single stranded target nucleic acid comprises a PAM sequence described herein that is adjacent (e.g., within 1, 2, 3, 4, 5, 6, 7, 8, 9, 10, 15, 20, 25, 30, 35, 40, 45, or 50 nucleotides) or directly adjacent to the target sequence. In some embodiments, an RNP cleaves the single stranded target nucleic acid.

[0236] In some embodiments, a target nucleic acid is a double stranded nucleic acid comprising a target strand and a non-target strand, wherein the target strand comprises a target sequence. In some embodiments, the PAM sequence is located on the target strand. In some embodiments, the PAM sequence is located on the non-target strand. In some embodiments, the PAM sequence described herein is adjacent (e.g., within 1, 2, 3, 4, 5, 6, 7, 8, 9, 10, 15, 20, 25, 30, 35, 40, 45, or 50 nucleotides) to the target sequence on the target strand or the non-target strand. In some embodiments, such a PAM described herein is directly adjacent to the target sequence on the target strand or the non-target strand. In some embodiments, an RNP cleaves the target strand or the non-target strand. In some embodiments, the RNP cleaves both, the target strand and the non-target strand. In some embodiments, an RNP recognizes the PAM sequence, and hybridizes to a target sequence of the target nucleic acid. In some embodiments, the RNP cleaves the target nucleic acid, wherein the RNP has recognized the PAM sequence and is hybridized to the target sequence.

[0237] An effector protein of the present disclosure, or a multimeric complex thereof, may cleave or nick a target nucleic acid within or near a protospacer adjacent motif (PAM) sequence of the target nucleic acid. In some embodiments, cleavage occurs within 1, 2, 3, 4, 5, 6, 7, 8, 9 or 10 nucleotides of a 5′ or 3′ terminus of a PAM sequence.

[0238] In some embodiments, an effector protein or a multimeric complex thereof recognizes a PAM on a target nucleic acid. In some cases, multiple effector proteins of the multimeric complex recognize a PAM on a target nucleic acid. In some cases, only one effector protein of the multimeric complex recognizes a PAM on a target nucleic acid. In some embodiments, at least two of the multiple effector proteins recognize the same PAM sequence. In some embodiments, at least two of the multiple effector proteins recognize different PAM sequences. In some embodiments, only one effector protein of the multimeric complex recognizes a PAM on a target nucleic acid. In some cases, the PAM is 3′ to the spacer region of the guide nucleic acid. In some cases, the PAM is directly 3′ to the spacer region of the guide nucleic acid. In some cases, the PAM sequence comprises a sequence described herein.

[0239] Effector proteins of the present disclosure can recognize a wild type PAM or a mutant PAM in a target DNA. In some embodiments, the effector protein is a CasΦ effector protein of the present disclosure that recognizes a PAM of 5′-TBN-3′, where B is one or more of C, G, or, T. For example, CasΦ effector protein of the present disclosure can recognize a PAM of 5′-TTTN-3′, wherein N is any nucleotide. As another example, CasΦ effector protein of the present disclosure can recognize a PAM of 5′-TTN-3′, wherein N is any nucleotide. In some embodiments, the PAM is 5′-TTTA-3′, 5′-GTTK-3′, 5′-VTTK-3′, 5′-VTTS-3′, 5′-TTTS-3′ or 5′-VTTN-3′, wherein K is G or T, V is A, C or G, S is C or G and N is any nucleotide. In some embodiments, the PAM is 5′-GTTB-3′, wherein B is C, G, or, T. In some embodiments of the present disclosure, the CasΦ effector protein can recognize a PAM of 5′-NTTN-3′, wherein N is any nucleotide. Other effector proteins disclosed herein (e.g., effector proteins of SEQ ID NO: 95-203), or a multimeric complex thereof, can recognize a different PAM sequence in the target nucleic acid. In some cases, the PAM sequence is 5′-CTT-3′. In some cases, the PAM sequence is 5′-CC-3′. In some cases, the PAM sequence is 5′-TCG-3′. In some cases, the PAM sequence is 5′-GCG-3′. In some cases, the PAM sequence is 5′-TTG-3′. In some cases, the PAM sequence is 5′-GTG-3′. In some cases, the PAM sequence is 5′-ATTA-3′. In some cases, the PAM sequence is 5′-ATTG-3′. In some cases, the PAM sequence is 5′-GTTA-3′. In some cases, the PAM sequence is 5′-GTTG-3′. In some cases, the PAM sequence is 5′-TC-3′. In some cases, the PAM sequence is 5′-ACTG-3′. In some cases, the PAM sequence is 5′-GCTG-3′. In some cases, the PAM sequence is 5′-TTC-3′. In some cases, the PAM sequence is 5′-TTT-3′.

[0240] Effector proteins of the present disclosure, dimers thereof, and multimeric complexes thereof can cleave or nick a target nucleic acid within or near a protospacer adjacent motif (PAM) sequence of the target nucleic acid. In some embodiments, cleavage occurs within 1, 2, 3, 4, 5, 6, 7, 8, 9, 10, 11, 12, 13, 14, 15, 16, 17, 18, 19, 20, 21, 22, 23, 24, 25, 26, 27, 28, 29, 30, 35, 40, 45, or 50 nucleotides of a 5′ or 3′ terminus of a PAM sequence. As a result of this cleavage, in some embodiments, an indel occurs within 1, 2, 3, 4, 5, 6, 7, 8, 9, 10, 11, 12, 13, 14, 15, 16, 17, 18, 19, 20, 21, 22, 23, 24, 25, 26, 27, 28, 29, 30, 35, 40, 45, or 50 nucleotides of the PAM sequence. A target nucleic acid can comprise a PAM sequence adjacent to a sequence that is complementary to a guide nucleic acid spacer region.

### Guide Nucleic Acids

[0241] Provided herein are vectors that include nucleotide sequences that, when transcribed and/or cleaved by the effector protein, produces one or more engineered guide nucleic acids. In some embodiments, the vectors comprise viral vectors or nonviral vectors. Accordingly, provided herein are viral vectors that include nucleotide sequences that, when transcribed and/or cleaved by the effector protein, produces one or more engineered guide nucleic acids. Guide nucleic acids, when composed of RNA, are often referred to as a “guide RNAs.” However, a guide nucleic acid can comprise deoxyribonucleotides. Accordingly, in some embodiments, guide nucleic acids can comprise DNA, RNA, or a combination thereof (e.g., RNA with a thymine base). The term “guide RNA,” as well as crRNA and tracrRNA sequence, include guide nucleic acids comprising DNA bases, RNA bases and modified nucleobases.

[0242] A guide nucleic acid may comprise a non-naturally occurring sequence, wherein the sequence of the guide nucleic acid, or any portion thereof, may be different from the sequence of a naturally occurring guide nucleic acid. A guide nucleic acid of the present disclosure comprises one or more of the following: a) a single nucleic acid molecule; b) a DNA base; c) an RNA base; d) a modified base; e) a modified sugar; f) a modified backbone; and the like. Modifications are described herein and throughout the present disclosure (e.g., in the section entitled “Engineered Modifications”). A guide nucleic acid may be chemically synthesized or recombinantly produced by any suitable methods. Guide nucleic acids can include a chemically modified nucleobase or phosphate backbone. In some embodiments, guide nucleic acids described herein comprises one or more 2′O-methyl modified nucleotides. In some embodiments, guide nucleic acids described herein comprises at least one 2′O-methyl modified nucleotides. In some embodiments, guide nucleic acids described herein comprises one, two, three, four or five 2′O-methyl modified nucleotides. In some embodiments, guide nucleic acids described herein comprises one, two, three, four or five contiguous 2′O-methyl modified nucleotides. In some embodiments, 3′ end of any one of the guide nucleic acids described herein comprises one, two, three, four or five contiguous 2′O-methyl modified nucleotides. In some embodiments, 5′ end of any one of the guide nucleic acids described herein comprises one, two, three, four or five contiguous 2′O-methyl modified nucleotides.

[0243] In general, the guide nucleic acid comprises a nucleotide sequence that is at least 80%, at least 85%, at least 90%, at least 95%, at least 98%, at least 99%, or 100% complementary to the target sequence. In some embodiments, the guide nucleic acid comprises at least 10 contiguous nucleotides that are complementary to the target sequence in the target nucleic acid. In some embodiments, guide nucleic acid comprises a spacer sequence that is at least 80%, at least 85%, at least 90%, at least 95%, at least 98%, at least 99%, or 100% complementary to the target sequence.

[0244] In some embodiments, the guide nucleic acid can comprise a first region complementary to a target sequence (FR1) and a second region that is not complementary to the target sequence (FR2). In some embodiments, FR1 is located 5′ to FR2 (FR1-FR2). In some embodiments, FR2 is located 5′ to FR1 (FR2-FR1).

[0245] In some embodiments, the FR1 comprises one or more repeat sequences, handle sequence, or intermediary sequence. In some embodiments, an effector protein binds to at least a portion of the FR1. In some embodiments, the FR2 comprises a spacer sequence, wherein the spacer sequence can interact in a sequence-specific manner with (e.g., has complementarity with, or can hybridize to a target sequence in) a target nucleic acid.

[0246] In some embodiments, the first region, the second region, or both may be about 8 nucleic acids, about 10 nucleic acids, about 12 nucleic acids, about 14 nucleic acids, about 16 nucleic acids, about 18 nucleic acids, about 20 nucleic acids, about 22 nucleic acids, about 24 nucleic acids, about 26 nucleic acids, about 28 nucleic acids, about 30 nucleic acids, about 32 nucleic acids, about 34 nucleic acids, about 36 nucleic acids, about 38 nucleic acids, about 40 nucleic acids, about 42 nucleic acids, about 44 nucleic acids, about 46 nucleic acids, about 48 nucleic acids, or about 50 nucleic acids long.

[0247] In some embodiments, the first region, the second region, or both may be from about 8 to about 12, from about 8 to about 16, from about 8 to about 20, from about 8 to about 24, from about 8 to about 28, from about 8 to about 30, from about 8 to about 32, from about 8 to about 34, from about 8 to about 36, from about 8 to about 38, from about 8 to about 40, from about 8 to about 42, from about 8 to about 44, from about 8 to about 48, or from about 8 to about 50 nucleic acids long.

[0248] In some embodiments, the first region, the second region, or both may comprise a GC content of about 1%, about 5%, about 10%, about 15%, about 20%, about 25%, about 30%, about 40%, about 50%, about 60%, about 70%, about 80%, about 90%, about 95%, or about 99%. In some embodiments, the first region, the second region, or both may comprise a GC content of from about 1% to about 95%, from about 5% to about 90%, from about 10% to about 80%, from about 15% to about 70%, from about 20% to about 60%, from about 25% to about 50%, or from about 30% to about 40%.

[0249] In some embodiments, the first region, the second region, or both may have a melting temperature of about 38° C., about 40° C., about 42° C., about 44° C., about 46° C., about 48° C., about 50° C., about 52° C., about 54° C., about 56° C., about 58° C., about 60° C., about 62° C., about 64° C., about 66° C., about 68° C., about 70° C., about 72° C., about 74° C., about 76° C., about 78° C., about 80° C., about 82° C., about 84° C., about 86° C., about 88° C., about 90° C., or about 92° C. In some embodiments, the first region, the second region, or both may have a melting temperature of from about 35° C. to about 40° C., from about 35° C. to about 45° C., from about 35° C. to about 50° C., from about 35° C. to about 55° C., from about 35° C. to about 60° C., from about 35° C. to about 65° C., from about 35° C. to about 70° C., from about 35° C. to about 75° C., from about 35° C. to about 80° C., or from about 35° C. to about 85° C.

[0250] In some embodiments, the compositions, systems, devices, kits, and methods of the present disclosure further comprise an additional nucleic acid, wherein a portion of the additional nucleic acid at least partially hybridizes to the first region of the guide nucleic acid. In some embodiments, the additional nucleic acid is at least partially hybridized to the 5′ end of the second region of the guide nucleic acid. In some embodiments, an unhybridized portion of the additional nucleic acid, at least partially, interacts with an effector protein or polypeptide. In some embodiments, the compositions, systems, devices, kits, and methods of the present disclosure comprise a dual nucleic acid system comprising the guide nucleic acid and the additional nucleic acid as described herein.

[0251] In general, a guide nucleic acid is a nucleic acid molecule that binds to an effector protein (e.g., a Cas effector protein), thereby forming a RNP complex. In some embodiments, when in a complex, at least a portion of the complex may bind, recognize, and/or hybridize to a target nucleic acid. For example, when a guide nucleic acid and an effector protein are complexed to form an RNP, at least a portion of the guide nucleic acid hybridizes to a target sequence in a target nucleic acid. Those skilled in the art in reading the below specific examples of guide nucleic acids as used in RNPs described herein, will understand that in some embodiments, a RNP may hybridize to one or more target sequences in a target nucleic acid, thereby allowing the RNP to modify and/or recognize a target nucleic acid or sequence contained therein (e.g., PAM) or to modify and/or recognize non-target sequences depending on the guide nucleic acid, and in some embodiments, the effector protein, used.

[0252] In some embodiments, a guide nucleic acid may comprise or form intramolecular secondary structure (e.g., hairpins, stem-loops, etc.). In some embodiments, a guide nucleic acid comprises a stem-loop structure comprising a stem region and a loop region. In some embodiments, the stem region is 4 to 8 linked nucleotides in length. In some embodiments, the stem region is 5 to 6 linked nucleotides in length. In some embodiments, the stem region is 4 to 5 linked nucleotides in length. In some embodiments, the guide nucleic acid comprises a pseudoknot (e.g., a secondary structure comprising a stem, at least partially, hybridized to a second stem or half-stem secondary structure). An effector protein may recognize a guide nucleic acid comprising multiple stem regions. In some embodiments, the nucleotide sequences of the multiple stem regions are identical to one another. In some embodiments, the nucleotide sequences of at least one of the multiple stem regions is not identical to those of the others. In some embodiments, the guide nucleic acid comprises at least 2, at least 3, at least 4, or at least 5 stem regions.

[0253] In some embodiments, the compositions, systems, and methods of the present disclosure comprise two or more guide nucleic acids (e.g., 2, 3, 4, 5, 6, 7, 9, 10 or more guide nucleic acids), and/or uses thereof. Multiple guide nucleic acids may target an effector protein to different locations in the target nucleic acid by hybridizing to different target sequences. In some embodiments, a first guide nucleic acid may hybridize within a location of the target nucleic acid that is different from where a second guide nucleic acid may hybridize the target nucleic acid. In some embodiments, the first loci and the second loci of the target nucleic acid may be located at least 1, at least 10, at least 20, at least 30, at least 40, at least 50, at least 60, at least 70, at least 80, at least 90 or at least 100 nucleotides apart. In some embodiments, the first loci and the second loci of the target nucleic acid may be located between 100 and 200, 200 and 300, 300 and 400, 400 and 500, 500 and 600, 600 and 700, 700 and 800, 800 and 900 or 900 and 1000 nucleotides apart. In some embodiments, the first loci and/or the second loci of the target nucleic acid are located in an intron of a gene. In some embodiments, the first loci and/or the second loci of the target nucleic acid are located in an exon of a gene. In some embodiments, the first loci and/or the second loci of the target nucleic acid span an exon-intron junction of a gene. In some embodiments, the first portion and/or the second portion of the target nucleic acid are located on either side of an exon and cutting at both sites results in deletion of the exon. In some embodiments, composition, systems, and methods comprise a donor nucleic acid that may be inserted in replacement of a deleted or cleaved sequence of the target nucleic acid. In some embodiments, compositions, systems, and methods comprising multiple guide nucleic acids or uses thereof comprise multiple effector proteins, wherein the effector proteins may be identical, non-identical, or combinations thereof.

[0254] In some embodiments, the engineered guide nucleic acid imparts activity or sequence selectivity to the effector protein. A guide nucleic acid can comprise a CRISPR RNA (crRNA), an associated tracrRNA sequence or a combination thereof. In general, the engineered guide nucleic acid comprises a crRNA that is at least partially complementary to a target nucleic acid. In some embodiments, the engineered guide nucleic acid comprises a tracrRNA sequence, at least a portion of which interacts with the effector protein. The tracrRNA can hybridize to a portion of the guide nucleic acid that does not hybridize to the target nucleic acid. In some embodiments, guide nucleic acids can be a guide RNA (gRNA). In some embodiments, the crRNA and tracrRNA sequence are provided as a single guide nucleic acid, also referred to as a single guide RNA (sgRNA). However, a guide RNA is not limited to ribonucleotides, but can comprise deoxyribonucleotides and other chemically modified nucleotides. The combination of a crRNA with a tracrRNA sequence can be referred to herein as a single guide RNA (sgRNA), wherein the crRNA and the tracrRNA sequence are covalently linked. In some embodiments, the crRNA and tracrRNA sequence are linked by a phosphodiester bond. In some embodiments, the crRNA and tracrRNA sequence are linked by one or more linked nucleotides. In some embodiments, a crRNA and tracrRNA function as two separate, unlinked molecules. A guide nucleic acid can comprise a naturally occurring guide nucleic acid. A guide nucleic acid can comprise a non-naturally occurring guide nucleic acid, including a guide nucleic acid that is designed to contain a chemical or biochemical modification.

[0255] In some embodiments, the length of the guide nucleic acid is not greater than about 40, about 45, about 50, about 55, about 60, about 65, about 70, about 75, about 80, about 85, about 90, about 95, about 100 linked nucleotides. In some embodiments, the length of the guide nucleic acid is about 30 to about 100 linked nucleotides. In some embodiments, the length of a guide nucleic acid is about 40 to about 100, about 40 to about 90, about 40 to about 80, about 40 to about 70, about 40 to about 60, about 40 to about 50, about 50 to about 90, about 50 to about 80, about 50 to about 70, or about 50 to about 60 linked nucleotides. In some embodiments, the length of a guide nucleic acid is about 40, about 45, about 50, about 55, about 60, about 65, about 70 or about 75 linked nucleotides.

[0256] In some embodiments, the guide nucleic acid, in total (including any tracrRNA sequence), comprises 10, 11, 12, 13, 14, 15, 16, 17, 18, 19, 20, 21, 22, 23, 24, 25, 26, 27, 28, 29, 30, 31, 32, 33, 34, 35, 36, 37, 38, 39, 40, 41, 42, 43, 44, 45, 46, 47, 48, 49, 50, 51, 52, 53, 54, 55, 56, 57, 58, 59, 60, 61, 62, 63, 64, 65, 66, 67, 68, 69, 70, 71, 72, 73, 74, 75, 76, 77, 78, 79, 80, 81, 82, 83, 84, 85, 86, 87, 88, 89, 90, 91, 92, 93, 94, 95, 96, 97, 98, 99, or 100 linked nucleotides. In general, a guide nucleic acid comprises at least linked nucleotides. In some embodiments, a guide nucleic acid comprises at least 25 linked nucleotides in total. A guide nucleic acid can comprise 10 to 100 linked nucleotides in total. In some embodiments, the guide nucleic acid comprises or consists essentially of about 12 to about 80 linked nucleotides, about 12 to about 50, about 12 to about 45, about 12 to about 40, about 12 to about 35, about 12 to about 30, about 12 to about 25, from about 12 to about 20, about 12 to about 19, about 19 to about 20, about 19 to about 25, about 19 to about 30, about 19 to about 35, about 19 to about 40, about 19 to about 45, about 19 to about 50, about 19 to about 60, about 20 to about 25, about 20 to about 30, about 20 to about 35, about 20 to about 40, about 20 to about 45, about 20 to about 50, or about 20 to about 60 linked nucleotides in total. In some embodiments, the guide nucleic acid has about 10 to about 60, about 20 to about 50, or about 30 to about 40 linked nucleotides in total.

[0257] In some embodiments, guide nucleic acids comprise additional elements that contribute additional functionality (e.g., stability, heat resistance, etc.) to the guide nucleic acid. Such elements may be one or more nucleotide alterations, nucleotide sequences, intermolecular secondary structures, or intramolecular secondary structures (e.g., one or more hair pin regions, one or more bulges, etc.).

[0258] In some embodiments, the viral vectors described herein and the non-viral vectors described herein include nucleotide sequences that produce guide nucleic acids that target the effector protein to different genes. In some embodiments, the methods described herein use guide nucleic acids that target the effector protein to different genes. Accordingly, in some embodiments, the nucleotide sequence that the effector protein binds is the same for the all of guide nucleic acids. Alternatively, in some embodiments, the nucleotide sequence that the effector protein binds is different for the guide nucleic acids. Thus, in some embodiments, the nucleotide sequence that the effector protein binds for the guide nucleic acids comprise at least about 90%, at least about 95%, at least about 98%, or at least 99% sequence identity to each other. Similarly, when the non-viral vector, the viral vectors or methods described herein produces or uses three or more guide nucleic acids, in some embodiments, two or more of the guide nucleic acids have the same nucleotide sequence that the effector protein binds, while one of the guide nucleic acids has a nucleotide sequence that the effector protein binds that is at least at least about 90%, at least about 95%, at least about 98%, or at least 99% sequence identity to the corresponding sequence in the other guide nucleic acids.

[0259] In some embodiments, the guide nucleic acid is not naturally occurring and made by artificial combination of otherwise separate segments of sequence. Often, the artificial combination is performed by chemical synthesis, by genetic engineering techniques, or by the artificial manipulation of isolated segments of nucleic acids. In some cases, the segment of a guide nucleic acid that comprises a sequence that is reverse complementary to the target nucleic acid is 20 nucleotides in length. A guide nucleic acid can have at least 10, 11, 12, 13, 14, 15, 16, 17, 18, 19, 20, 21, 22, 23, 24, 25, 26, 27, 28, 29, or 30 nucleotides reverse complementary to a target nucleic acid. In some cases, the guide nucleic acid can be 10, 11, 12, 13, 14, 15, 16, 17, 18, 19, 20, 21, 22, 23, 24, 25, 26, 27, 28, 29, or 30 nucleotides in length. For example, a guide nucleic acid can have at least 10 nucleotides reverse complementary to a target nucleic acid. In some embodiments, a guide nucleic acid have from 10 to 50 nucleotides reverse complementary to a target nucleic acid. In some embodiments, a guide nucleic acid have at least 25 nucleotides reverse complementary to a target nucleic acid. In some cases, the guide nucleic acid has from exactly or about 12 nucleotides to about 80 nucleotides, from about 12 nucleotides to about 50 nucleotides, from about 12 nucleotides to about 45 nucleotides, from about 12 nucleotides to about 40 nucleotides, from about 12 nucleotides to about 35 nucleotides, from about 12 nucleotides to about 30 nucleotides, from about 12 nucleotides to about 25 nucleotides, from about 12 nucleotides to about 20 nucleotides, from about 12 nucleotides to about 19 nucleotides, from about 19 nucleotides to about 20 nucleotides, from about 19 nucleotides to about 25 nucleotides, from about 19 nucleotides to about 30 nucleotides, from about 19 nucleotides to about 35 nucleotides, from about 19 nucleotides to about 40 nucleotides, from about 19 nucleotides to about 45 nucleotides, from about 19 nucleotides to about 50 nucleotides, from about 19 nucleotides to about 60 nucleotides, from about 20 nucleotides to about 25 nucleotides, from about 20 nucleotides to about 30 nucleotides, from about 20 nucleotides to about 35 nucleotides, from about 20 nucleotides to about 40 nucleotides, from about 20 nucleotides to about 45 nucleotides, from about 20 nucleotides to about 50 nucleotides, or from about 20 nucleotides to about 60 nucleotides reverse complement to a target nucleic acid. In some cases, the guide nucleic acid has from about 10 nucleotides to about 60 nucleotides, from about 20 nucleotides to about 50 nucleotides, or from about 30 nucleotides to about 40 nucleotides reverse complementary to a target nucleic acid. It is understood that the sequence of a guide nucleic acid need not be 100% reverse complementary to that of its target nucleic acid to be specifically hybridizable, hybridizable, or bind specifically. For example, the guide nucleic acid can have a sequence comprising at least one uracil in a region from nucleic acid residue 5 to 20 that is reverse complementary to a modification variable region in the target nucleic acid. The guide nucleic acid, in some cases, has a sequence comprising at least one uracil in a region from nucleic acid residue 5 to 9, 10 to 14, or 15 to 20 that is reverse complementary to a modification variable region in the target nucleic acid. The guide nucleic acid can have a sequence comprising at least one uracil in a region from nucleic acid residue 5 to 20 that is reverse complementary to a methylation variable region in the target nucleic acid. The guide nucleic acid, in some cases, has a sequence comprising at least one uracil in a region from nucleic acid residue 5 to 9, 10 to 14, or 15 to 20 that is reverse complementary to a methylation variable region in the target nucleic acid. The guide nucleic acid can hybridize with a target nucleic acid.

[0260] Guide nucleic acids, when complexed with an effector protein, can bring the effector protein into proximity of a target nucleic acid. Sufficient conditions for hybridization of a guide nucleic acid to a target nucleic acid and/or for binding of a guide nucleic acid to an effector protein include in vivo physiological conditions of a desired cell type or in vitro conditions sufficient for effectuating the activity of a protein, polypeptide or peptide described herein, such as the nuclease activity of an effector protein.

[0261] The guide nucleic acid can hybridize to a target nucleic acid (e.g., a single strand of a target nucleic acid) or a portion thereof. The guide nucleic acid can hybridize to a target nucleic acid, such as a target sequence within the TRAC gene, B2M gene or the CIITA gene. Accordingly, in some embodiments, the guide nucleic acid guide nucleic acid comprises a sequence that is complementary to an equal length portion of a target sequence of the TRAC gene. In some embodiments, guide nucleic acid comprises a sequence that is complementary to an equal length portion of a target sequence of the B2M gene. In some embodiments, guide nucleic acid comprises a sequence that is complementary to an equal length portion of a target sequence of the CIITA gene. In some embodiments, guide nucleic acid comprises a sequence that is at least 90% identical to an equal length portion of a target sequence of the TRAC gene. In some embodiments, guide nucleic acid comprises a sequence that is at least 90% identical to an equal length portion of a target sequence of the B2M gene. In some embodiments, guide nucleic acid comprises a sequence that is at least 90% identical to an equal length portion of a target sequence of the CIITA gene.

[0262] In some embodiments, the guide nucleic acid comprises a nucleotide sequence described as described herein (e.g., TABLES 2—20, 23-26, 29-31, 36 and 38). Such nucleotide sequences described herein (e.g., TABLES 2—20, 23-26, 29-31, 36 and 38) may be described as a nucleotide sequence of either DNA or RNA, however, no matter the form the sequence is described, it is readily understood that such nucleotide sequences can be revised to be RNA or DNA, as needed, for describing a sequence within a guide nucleic acid itself or the sequence that produces a guide nucleic acid, such as a nucleotide sequence described herein for a viral vector. Similarly, disclosure of the nucleotide sequences described herein (e.g., TABLES 2—20, 23-26, 29-31, 36 and 38) also discloses the complementary nucleotide sequence, the reverse nucleotide sequence, and the reverse complement nucleotide sequence, any one of which can be a nucleotide sequence for use in a guide nucleic acid as described herein.

[0263] In some embodiments, the guide nucleic acid comprises a sequence that is at least 30, at least 31, at least 32, at least 33, at least 34, at least 35, at least 36, at least 37, at least 38, at least 39, at least 40, at least 41, at least 42, at least 43, at least 44, at least 45, at least 46, at least 47, at least 48, at least 49, at least 50, at least 51, at least 52, at least 53, at least 54, at least 55, at least 56 or at least 57 contiguous nucleotides of a sequence described herein (e.g., TABLES 2—20, 23-26, 29-31, 36 and 38). In some embodiments, the guide nucleic acid comprises a sequence that is 30, 31, 32, 33, 34, 35, 36, 37, 38, 39, 40, 41, 42, 43, 44, 45, 46, 47, 48, 49, 50, 51, 52, 53, 54, 55, 56 or 57 contiguous nucleotides of a sequence described herein (e.g., TABLES 2—20, 23-26, 29-31, 36 and 38). In some embodiments, the guide nucleic acid comprises a sequence that is at least 30, at least 31, at least 32, at least 33, at least 34, at least 35, at least 36 or at least 37 contiguous nucleotides of a sequence described herein (e.g., TABLES 2—20, 23-26, 29-31, 36 and 38). In some embodiments, the guide nucleic acid comprises a sequence that is 30, 31, 32, 33, 34, 35, 36 or 37 contiguous nucleotides of a sequence described herein (e.g., TABLES 2—20, 23-26, 29-31, 36 and 38). In some embodiments, the guide nucleic acid comprises a repeat sequence described herein (e.g., TABLES 2-3) and/or a spacer sequence described herein (e.g., TABLES 5-16, 18-19, and 23).

[0264] In some embodiments, the effector protein disclosed herein is used in conjunction with a specific sequence (e.g., spacer or gRNA) for targeting an effector protein described herein to the TRAC gene, the B2M gene or the CIITA gene (e.g., TABLES 5-16, 19-20 or 29-31). In some embodiments, the guide nucleic acid comprises a nucleotide sequence that is at least 70%, at least 80%, at least 90%, at least 92%, at least 95%, at least 97%, at least 99%, or 100% identical to any one of sequences described herein (e.g., TABLES 5-20, 23-26, 29-31, 36 and 38) or a complement thereof.

[0265] In some embodiments, a guide nucleic acid comprises a nucleotide sequence for targeting the effector protein to the TRAC gene. In some embodiments, such a guide nucleic acid comprises a nucleotide sequence of any one of the sequences recited in TABLE 5, TABLE 5.1, TABLE 9, TABLE 9.1, TABLE 10, TABLE 10.1, TABLE 14, TABLE 14.1, TABLE 19, TABLE 20 and TABLE 30. In some embodiments, such a guide nucleic acid comprises a nucleotide sequence of at least about: 80%, 85%, 90%, 95%, 96%, 97%, 98%, or 99% sequence identity to any one of the sequences recited in TABLE 5, TABLE 5.1, TABLE 9, TABLE 9.1, TABLE 10, TABLE 10.1, TABLE 14, TABLE 14.1, TABLE 19, TABLE 20 and TABLE 30.

[0266] In some embodiments, a guide nucleic acid comprises a nucleotide sequence for targeting the effector protein to the B2M gene. In some embodiments, such a guide nucleic acid comprises a nucleotide sequence of any one of the sequences recited in TABLE 6, TABLE 6.1, TABLE 11, TABLE 11.1, TABLE 12, TABLE 12.1, TABLE 15, TABLE 15.1, TABLE 20 and TABLE 29. In some embodiments, such a guide nucleic acid comprises a nucleotide sequence of at least about: 80%, 85%, 90%, 95%, 96%, 97%, 98%, or 99% sequence identity to anyone of the sequences recited in TABLE 6, TABLE 6.1, TABLE 11, TABLE 11.1, TABLE 12, TABLE 12.1, TABLE 15, TABLE 15.1, TABLE 20 and TABLE 29.

[0267] In some embodiments, a guide nucleic acid comprises a nucleotide sequence for targeting the effector protein to the CIITA gene. In some embodiments, such a guide nucleic acid comprises a nucleotide sequence of any one of the sequences recited in TABLE 7, TABLE 7.1, TABLE 8, TABLE 13, TABLE 16 and TABLE 31. In some embodiments, such a guide nucleic acid comprises a nucleotide sequence of at least about: 80%, 85%, 90%, 95%, 96%, 97%, 98%, or 99% sequence identity to any one of the sequences recited in TABLE 7, TABLE 7.1, TABLE 8, TABLE 13, TABLE 16 and TABLE 31.

[0268] In some embodiments, a guide nucleic acid comprises shorter versions of the guide nucleic acids disclosed herein. For example, the guide nucleic acid sequence can consist of a portion of a guide nucleic acid disclosed herein. In some instances, shorter versions can provide enhanced activity relative to their longer versions. Examples of longer versions of guide RNA for CasΦ.12 are shown in TABLES 8, 9 and 11, whereas shorter versions are show in TABLES 14, 15 and 16. The shorter versions are produced by removing sixteen nucleotides from the 5′ end of the long version and three nucleotides from the 3′ end of the long version. In some embodiments, the long version is a CasΦ.32 guide nucleic acid described in TABLES 10, 12 and 13, and, similar to the guide RNA for CasΦ.12, the shorter version is a guide nucleic acid without the sixteen nucleotides at the 5′ end of the long version and without the three nucleotides at the 3′ end of the long version.

### Repeat Sequence

[0269] In some embodiments, the repeat region described herein comprises one or more 2′O-methyl modified nucleotides. In some embodiments, the repeat region described herein comprises at least one 2′O-methyl modified nucleotides. In some embodiments, the repeat region described herein comprises one, two, three, four or five 2′O-methyl modified nucleotides. In some embodiments, the repeat region described herein comprises one, two, three, four or five contiguous 2′O-methyl modified nucleotides. In some embodiments, 3′ end of any one of the repeat region described herein comprises one, two, three, four or five contiguous 2′O-methyl modified nucleotides.

[0270] In some embodiments, the repeat sequence of the guide nucleic acid comprises a hairpin. In some embodiments, the hairpin is in the 3′ portion of the repeat sequence. The hairpin comprises a double-stranded stem portion and a single-stranded loop portion. In some embodiments, one stand of the stem portion comprises a CYC sequence and the other strand comprises a GRG sequence, wherein Y and R are complementary. In some embodiments, the repeat sequence comprises a GAC sequence at the 3′ end. In some embodiments, the G of the GAC sequence is in the stem portion of the hairpin. In some embodiments, each strand of the stem portion comprises 3, 4, 5, 6, 7, 8, 9 or 10 nucleotides. In some embodiments, each strand of the stem portion comprises 3, 4 or 5 nucleotides. In some embodiments, the loop portion comprises 2, 3, 4, 5, 6, 7, 8, 9, 10 or more nucleotides. In some embodiments, the loop portion comprises 2, 3, 4, 5 or 6 nucleotides. In some embodiments, the loop portion comprises 4 nucleotides. In some embodiments, the nucleotides are naturally occurring nucleotides. In some embodiments, the nucleotides are synthetic nucleotides.

[0271] Guide nucleic acids described herein may comprise one or more repeat sequences. In some embodiments, a repeat sequence comprises a nucleotide sequence that is not complementary to a target sequence of a target nucleic acid. In some embodiments, a repeat sequence comprises a nucleotide sequence that may interact with an effector protein. In some embodiments, a repeat sequence is connected to another sequence of a guide nucleic acid, such as an intermediary sequence, that is capable of non-covalently interacting with an effector protein. In some embodiments, a repeat sequence includes a nucleotide sequence that is capable of forming a guide nucleic acid-effector protein complex (e.g., a RNP complex).

[0272] In some embodiments, the repeat sequence is between 10 and 50, 12 and 48, 14 and 46, 16 and 44, and 18 and 42 nucleotides in length.

[0273] In some embodiments, a repeat sequence is adjacent to a spacer sequence. In some embodiments, a repeat sequence is followed by a spacer sequence in the 5′ to 3′ direction. In some embodiments, a repeat sequence is preceded by a spacer sequence in the 5′ to 3′ direction. In some embodiments, a repeat sequence is adjacent to an intermediary sequence. In some embodiments, a repeat sequence is 3′ to an intermediary sequence. In some embodiments, an intermediary sequence is followed by a repeat sequence, which is followed by a spacer sequence in the 5′ to 3′ direction. In some embodiments, a repeat sequence is linked to a spacer sequence and/or an intermediary sequence. In some embodiments, a guide nucleic acid comprises a repeat sequence linked to a spacer sequence and/or to an intermediary sequence, which may be a direct link or by any suitable linker, examples of which are described herein.

[0274] In some embodiments, guide nucleic acids comprise more than one repeat sequence (e.g., two or more, three or more, or four or more repeat sequences). In some embodiments, a guide nucleic acid comprises more than one repeat sequence separated by another sequence of the guide nucleic acid. For example, in some embodiments, a guide nucleic acid comprises two repeat sequences, wherein the first repeat sequence is followed by a spacer sequence, and the spacer sequence is followed by a second repeat sequence in the 5′ to 3′ direction. In some embodiments, the more than one repeat sequences are identical. In some embodiments, the more than one repeat sequences are not identical.

[0275] In some embodiments, the repeat sequence comprises two sequences that are complementary to each other and hybridize to form a double stranded RNA duplex (dsRNA duplex). In some embodiments, the two sequences are not directly linked and hybridize to form a stem loop structure. In some embodiments, the dsRNA duplex comprises 5, 10, 15, 20 or 25 base pairs (bp). In some embodiments, not all nucleotides of the dsRNA duplex are paired, and therefore the duplex forming sequence may include a bulge. In some embodiments, the repeat sequence comprises a hairpin or stem-loop structure, optionally at the 5′ portion of the repeat sequence. In some embodiments, a strand of the stem portion comprises a sequence and the other strand of the stem portion comprises a sequence that is, at least partially, complementary. In some embodiments, such sequences may have 65% to 100% complementarity (e.g., 65%, 70%, 75%, 80%, 85%, 90%, 95%, or 100% complementarity). In some embodiments, a guide nucleic acid comprises nucleotide sequence that when involved in hybridization events may hybridize over one or more segments such that intervening or adjacent segments are not involved in the hybridization event (e.g., a bulge, a loop structure or hairpin structure, etc.).

[0276] In some embodiments, a repeat sequence comprises a nucleotide sequence that is at least 65%, at least 70%, at least 75%, at least 80%, at least 85%, at least 90%, at least 95%, at least 97%, or at least 98%, at least 99%, or 100% identical to an equal length portion of any one of the repeat sequences in TABLE 2 and TABLE 3. In some embodiments, a repeat sequence comprises at least 5, at least 6, at least 7, at least 8, at least 9, at least 10, at least 11, at least 12, at least 13, at least 14, at least 15, at least 16, at least 17, at least 18, at least 19, at least 20, or at least 21 contiguous nucleotides of any one of the sequences recited in TABLE 2 and TABLE 3.

### Spacer Sequence

[0277] In general, guide nucleic acids comprise a spacer region that hybridizes to a target sequence of a target nucleic acid, and a repeat region that interacts with (e.g., binds) the effector protein. The repeat region can also be referred to as a “protein-binding segment.” Typically, the repeat region is adjacent to the spacer region. For example, a guide nucleic acid that interacts (e.g., binds) with the effector protein comprises a repeat region that is 5′ of the spacer region. The spacer region of the guide nucleic acid can have complementarity with (e.g., hybridize to) an equal length portion of a target sequence of a target nucleic acid. In some embodiments, the spacer region is at least 90% identity, at least 91% identity, at least 92% identity, at least 93% identity, at least 94% identity, at least 95% identity, at least 96% identity, at least 97% identity, at least 98% identity, or at least 99% identity complementary to an equal length portion of a target sequence of the target nucleic acid. In some embodiments, the spacer region is 100% complementary to an equal length portion of a target sequence of a target nucleic acid. Alternatively, the spacer region of the guide nucleic acid can have a certain % identity to an equal length portion of a target sequence of a target nucleic acid. Accordingly, in some embodiments, the spacer region of the guide nucleic acid can have at least 90% identity, at least 910% identity, at least 92% identity, at least 93% identity, at least 94% identity, at least 95% identity, at least 96% identity, at least 97% identity, at least 98% identity, at least 99% identity, to an equal length portion of a target sequence of the target nucleic acid. In some embodiments, the spacer region is 100% identical to an equal length portion of a target sequence of a target nucleic acid.

[0278] In some embodiments, the spacer region described herein comprises one or more 2′O-methyl modified nucleotides. In some embodiments, the spacer region described herein comprises at least one 2′O-methyl modified nucleotides. In some embodiments, the spacer region described herein comprises one, two, three, four or five 2′O-methyl modified nucleotides. In some embodiments, the spacer region described herein comprises one, two, three, four or five contiguous 2′O-methyl modified nucleotides. In some embodiments, 5′ end of any one of the spacer region described herein comprises one, two, three, four or five contiguous 2′O-methyl modified nucleotides.

[0279] In some embodiments, the spacer region is 15-28 linked nucleotides in length. In some embodiments, the spacer region is 15-26, 15-24, 15-22, 15-20, 15-18, 16-28, 16-26, 16-24, 16-22, 16-20, 16-18, 17-26, 17-24, 17-22, 17-20, 17-18, 18-26, 18-24, or 18-22 linked nucleotides in length. In some embodiments, the spacer region is 18-24 linked nucleotides in length. In some embodiments, the spacer region is at least 15 linked nucleotides in length. In some embodiments, the spacer region is at least 16, 18, 20, or 22 linked nucleotides in length. In some embodiments, the spacer region comprises at least 10, 11, 12, 13, 14, 15, 16, 17, 18, 19, 20, 21, 22, 23, 24, 25, 26, 27, 28, 29, or 30 nucleotides. In some embodiments, the spacer region is at least 17 linked nucleotides in length. In some embodiments, the spacer region is at least 18 linked nucleotides in length. In some embodiments, the spacer region is at least 20 linked nucleotides in length. In some embodiments, the spacer region comprises at least 15 contiguous nucleotides that are complementary to the target nucleic acid.

[0280] In some embodiments, the guide nucleic acid comprises a spacer sequence that is the same as or differs by no more than 5 nucleotides from a spacer sequence described herein (e.g., TABLES 5-16, 18-19, and 23) by no more than 4 nucleotides from a spacer sequence described herein (e.g., TABLES 5-16, 18-19, and 23), by no more than 3 nucleotides from a spacer sequence described herein (e.g., TABLES 5-16, 18-19, and 23), no more than 2 nucleotides from a spacer sequence described herein (e.g., TABLES 5-16, 18-19, and 23), or no more than 1 nucleotide from a spacer sequence described herein (e.g., TABLES 5-16, 18-19, and 23). A difference can be addition, deletion or substitution and where there are multiple differences, the differences can be addition, deletion and/or substitution. In the sequences provided in TABLES 8, 13 or 16, the base T is interchangeable with U when a guide nucleic either is or comprises ribonucleic or deoxyribonucleic nucleosides.

[0281] The spacer region of guide nucleic acids for the effector proteins disclosed herein can comprise a seed region. In some embodiments, the seed regions do not tolerate mismatches in the complementarity of a spacer and a target sequence within about 1 to about 20 nucleotides from the 5′ end of a spacer sequence. The seed region starts from the 5′ end of the spacer sequence and is a region in which mismatches in the complementarity between the spacer sequence and the target sequence are not tolerated when the guide nucleic acid is bound to an effector protein such that the guide nucleic acid does not hybridize to the target sequence to allow cleavage of the target nucleic acid by the effector protein. In some embodiments, the seed region comprises between 10 and 20 nucleotides, between 12 and 20 nucleotides, between 14 and 20 nucleotides, between 14 and 18 nucleotides, between 10 and 16 nucleotides, between 12 and 16 nucleotides, or between 14 and 16 nucleotides. In some embodiments, the seed region comprises 16 nucleotides.

### Linker for Nucleic Acids

[0282] In some embodiments, guide nucleic acids comprise one or more linkers connecting different nucleotide sequences as described herein. A linker may comprise 1, 2, 3, 4, 5, 6, 7, 8, 9, 10, or more nucleotides. In some embodiments, the guide nucleic acid comprises at least one, at least two, at least three, at least four, at least five, at least six, at least seven, at least eight, at least nine, or at least ten linkers. In some embodiments, the guide nucleic acid comprises more than one linker. In some embodiments, at least two of the more than one linker are the same. In some embodiments, at least two of the more than one linker are not same. In some embodiments, a linker comprises one to ten, one to seven, one to five, one to three, two to ten, two to eight, two to six, two to four, three to ten, three to seven, three to five, four to ten, four to eight, four to six, five to ten, five to seven, six to ten, six to eight, seven to ten, or eight to ten linked nucleotides. In some embodiments, the linker comprises one, two, three, four, five, six, seven, eight, nine, or ten linked nucleotides.

[0283] In some embodiments, a guide nucleic acid comprises one or more linkers connecting one or more repeat sequences. In some embodiments, the guide nucleic acid comprises one or more linkers connecting one or more repeat sequences and one or more spacer sequences. In some embodiments, the guide nucleic acid comprises at least two repeat sequences connected by a linker.

[0284] A linker may be any suitable linker, examples of which are described herein. In some embodiments, a linker comprises a nucleotide sequence of 5′-GAAA-3′.

### Intermediary Sequence

[0285] Guide nucleic acids described herein may comprise one or more intermediary sequences. In general, an intermediary sequence used in the present disclosure is not transactivated or transactivating. An intermediary sequence may comprise deoxyribonucleotides instead of or in addition to ribonucleotides, and/or modified bases. In general, the intermediary sequence non-covalently binds to an effector protein. In some embodiments, the intermediary sequence forms a secondary structure, for example in a cell, and an effector protein binds the secondary structure.

[0286] In some embodiments, a length of the intermediary sequence is at least 30, 50, 70, 90, 110, 130, 150, 170, 190, or 210 linked nucleotides. In some embodiments, a length of the intermediary sequence is not greater than 30, 50, 70, 90, 110, 130, 150, 170, 190, or 210 linked nucleotides. In some embodiments, the length of the intermediary sequence is about 30 to about 210, about 60 to about 210, about 90 to about 210, about 120 to about 210, about 150 to about 210, about 180 to about 210, about 30 to about 180, about 60 to about 180, about 90 to about 180, about 120 to about 180, or about 150 to about 180 linked nucleotides.

[0287] An intermediary sequence may also comprise or form a secondary structure (e.g., one or more hairpin loops) that facilitates the binding of an effector protein to a guide nucleic acid and/or modification activity of an effector protein on a target nucleic acid (e.g., a hairpin region). An intermediary sequence may comprise from 5′ to 3′, a 5′ region, a hairpin region, and a 3′ region. In some embodiments, the 5′ region may hybridize to the 3′ region. In some embodiments, the 5′ region of the intermediary sequence does not hybridize to the 3′ region.

[0288] In some embodiments, the hairpin region may comprise a first sequence, a second sequence that is reverse complementary to the first sequence, and a stem-loop structure linking the first sequence and the second sequence. In some embodiments, an intermediary sequence comprises a stem-loop structure comprising a stem region and a loop region. In some embodiments, the stem region is 4 to 8 linked nucleotides in length. In some embodiments, the stem region is 5 to 6 linked nucleotides in length. In some embodiments, the stem region is 4 to 5 linked nucleotides in length. In some embodiments, an intermediary sequence comprises a pseudoknot (e.g., a secondary structure comprising a stem at least partially hybridized to a second stem or half-stem secondary structure). An effector protein may interact with an intermediary sequence comprising a single stem region or multiple stem regions. In some embodiments, the nucleotide sequences of the multiple stem regions are identical to one another. In some embodiments, the nucleotide sequences of at least one of the multiple stem regions is not identical to those of the others. In some embodiments, an intermediary sequence comprises 1, 2, 3, 4, 5 or more stem regions.

[0289] In some embodiments, an intermediary sequence comprises a nucleotide sequence that is at least 65%, at least 70%, at least 75%, at least 80%, at least 85%, at least 90%, at least 95%, at least 97%, or at least 98%, at least 99%, or 100% identical to any one of the intermediary sequences in TABLE 4. In some embodiments, an intermediary sequence comprises at least 5, at least 6, at least 7, at least 8, at least 9, at least 10, at least 20, at least 30, at least 40, at least 50, at least 60, at least 70, at least 80, at least 90, at least 100, at least 110, at least 120, at least 130, or at least 140 contiguous nucleotides of any one of the intermediary sequences recited in TABLE 4.

### Handle Sequence

[0290] Guide nucleic acids described herein may comprise one or more handle sequences. In some embodiments, the handle sequence comprises an intermediary sequence. In such instances, at least a portion of an intermediary sequence non-covalently bonds with an effector protein. In some embodiments, the intermediary sequence is at the 3′-end of the handle sequence. In some embodiments, the intermediary sequence is at the 5′-end of the handle sequence. Additionally, or alternatively, in some embodiments, the handle sequence further comprises one or more of linkers and repeat sequences. In such instances, at least a portion of an intermediary sequence, or both of at least a portion of the intermediary sequence and at least a portion of repeat sequence, non-covalently interacts with an effector protein. In some embodiments, an intermediary sequence and repeat sequence are directly linked (e.g., covalently linked, such as through a phosphodiester bond). In some embodiments, the intermediary sequence and repeat sequence are linked by a suitable linker, examples of which are provided herein. In some embodiments, the linker comprises a sequence of 5′-GAAA-3′. In some embodiments, the intermediary sequence is 5′ to the repeat sequence. In some embodiments, the intermediary sequence is 5′ to the linker. In some embodiments, the intermediary sequence is 3′ to the repeat sequence. In some embodiments, the intermediary sequence is 3′ to the linker. In some embodiments, the repeat sequence is 3′ to the linker. In some embodiments, the repeat sequence is 5′ to the linker. In general, a single guide nucleic acid, also referred to as a single guide RNA (sgRNA), comprises a handle sequence comprising an intermediary sequence, and optionally one or more of a repeat sequence and a linker.

[0291] A handle sequence may comprise or form a secondary structure (e.g., one or more hairpin loops) that facilitates the binding of an effector protein to a guide nucleic acid and/or modification activity of an effector protein on a target nucleic acid (e.g., a hairpin region). In some embodiments, handle sequences comprise a stem-loop structure comprising a stem region and a loop region. In some embodiments, the stem region is 4 to 8 linked nucleotides in length. In some embodiments, the stem region is 5 to 6 linked nucleotides in length. In some embodiments, the stem region is 4 to 5 linked nucleotides in length. In some embodiments, the handle sequence comprises a pseudoknot (e.g., a secondary structure comprising a stem at least partially hybridized to a second stem or half-stem secondary structure). An effector protein may recognize a handle sequence comprising multiple stem regions. In some embodiments, the nucleotide sequences of the multiple stem regions are identical to one another. In some embodiments, the nucleotide sequences of at least one of the multiple stem regions is not identical to those of the others. In some embodiments, the handle sequence comprises at least 2, at least 3, at least 4, or at least 5 stem regions.

[0292] In some embodiments, a length of the handle sequence is at least 30, 50, 70, 90, 110, 130, 150, 170, 190, or 210 linked nucleotides. In some embodiments, a length of the handle sequence is not greater than 30, 50, 70, 90, 110, 130, 150, 170, 190, or 210 linked nucleotides. In some embodiments, the length of the handle sequence is about 30 to about 210, about 60 to about 210, about 90 to about 210, about 120 to about 210, about 150 to about 210, about 180 to about 210, about 30 to about 180, about 60 to about 180, about 90 to about 180, about 120 to about 180, or about 150 to about 180 linked nucleotides.

### A Single Nucleic Acid System

[0293] In some embodiments, compositions, systems and methods described herein comprise a single nucleic acid system comprising a guide nucleic acid or a nucleotide sequence encoding the guide nucleic acid, and one or more effector proteins or a nucleotide sequence encoding the one or more effector proteins. In some embodiments, a first region (FR1) of the guide nucleic acid non-covalently interacts with the one or more polypeptides described herein. In some embodiments, a second region (FR2) of the guide nucleic acid hybridizes with a target sequence of the target nucleic acid. In the single nucleic acid system having a complex of the guide nucleic acid and the effector protein, the effector protein is not transactivated by the guide nucleic acid. In other words, activity of effector protein does not require binding to a second non-target nucleic acid molecule. An exemplary guide nucleic acid for a single nucleic acid system is a crRNA or a sgRNA. crRNA

[0294] In some embodiments, a guide nucleic acid comprises a crRNA. In some embodiments, the guide nucleic acid is the crRNA. In general, a crRNA comprises a first region (FR1) and a second region (FR2), wherein the FR1 of the crRNA comprises a repeat sequence, and the FR2 of the crRNA comprises a spacer sequence. In some embodiments, the repeat sequence and the spacer sequences are directly connected to each other (e.g., covalent bond (phosphodiester bond)). In some embodiments, the repeat sequence and the spacer sequence are connected by a linker.

[0295] In some embodiments, a crRNA is useful as a single nucleic acid system for compositions, methods, and systems described herein or as part of a single nucleic acid system for compositions, methods, and systems described herein. In some embodiments, a crRNA is useful as part of a single nucleic acid system for compositions, methods, and systems described herein. In such embodiments, a single nucleic acid system comprises a guide nucleic acid comprising a crRNA wherein, a repeat sequence of a crRNA is capable of connecting a crRNA to an effector protein. In some embodiments, a single nucleic acid system comprises a guide nucleic acid comprising a crRNA linked to another nucleotide sequence that is capable of being non-covalently bond by an effector protein. In such embodiments, a repeat sequence of a crRNA can be linked to an intermediary sequence. In some embodiments, a single nucleic acid system comprises a guide nucleic acid comprising a crRNA and an intermediary sequence.

[0296] A crRNA may include deoxyribonucleosides, ribonucleosides, chemically modified nucleosides, or any combination thereof. In some embodiments, a crRNA comprises about: 10, 11, 12, 13, 14, 15, 16, 17, 18, 19, 20, 21, 22, 23, 24, 25, 26, 27, 28, 29, 30, 31, 32, 33, 34, 35, 36, 37, 38, 39, 40, 41, 42, 43, 44, 45, 46, 47, 48, 49, 50, 51, 52, 53, 54, 55, 56, 57, 58, 59, or 60 linked nucleotides. In some embodiments, a crRNA comprises at least: 10, 15, 20, 25, 30, 35, 40, 45, 50, 55, 60 linked nucleotides. In some embodiments, the length of the crRNA is about 20 to about 120 linked nucleotides. In some embodiments, the length of a crRNA is about 20 to about 100, about 30 to about 100, about 40 to about 100, about 40 to about 90, about 40 to about 80, about 40 to about 70, about 40 to about 60, about 40 to about 50, about 50 to about 90, about 50 to about 80, about 50 to about 70, or about 50 to about 60 linked nucleotides. In some embodiments, the length of a crRNA is about 20, about 25, about 30, about 35, about 40, about 45, about 50, about 55, about 60, about 65, about 70 or about 75 linked nucleotides.

[0297] In some embodiments, a crRNA comprises a nucleotide sequence that is at least 65%, at least 70%, at least 75%, at least 80%, at least 85%, at least 90%, at least 95%, at least 97%, or at least 98%, at least 99%, or 100% identical to any one of the crRNA sequences in TABLE 8, TABLE 9, TABLE 9.1, TABLE 10, TABLE 10.1, TABLE 11, TABLE 11.1, TABLE 12, TABLE 12.1, TABLE 13, TABLE 14, TABLE 14.1, TABLE 15, TABLE 15.1, TABLE 16, TABLE 18 and TABLE 25. In some embodiments, a crRNA sequence comprises a repeat sequence that is at least 65%, at least 70%, at least 75%, at least 80%, at least 85%, at least 90%, at least 95%, at least 97%, or at least 98%, at least 99%, or 100% identical to any one of the sequences set forth in TABLE 2 and TABLE 3, and a spacer sequence that is at least 65%, at least 70%, at least 75%, at least 80%, at least 85%, at least 90%, at least 95%, at least 97%, or at least 98%, at least 99%, or 100% identical to any one of the sequences set forth in TABLE 5-16, 18-19, and 23. In some embodiments, a crRNA comprises at least 5, at least 6, at least 7, at least 8, at least 9, at least 10, at least 11, at least 12, at least 13, at least 14, at least 15, at least 16, at least 17, at least 18, at least 19, at least 20, at least 25, or at least 30 contiguous nucleotides of any one of the crRNA sequences recited in TABLE 8, TABLE 9, TABLE 9.1, TABLE 10, TABLE 10.1, TABLE 11, TABLE 11.1, TABLE 12, TABLE 12.1, TABLE 13, TABLE 14, TABLE 14.1, TABLE 15, TABLE 15.1, TABLE 16, TABLE 18 and TABLE 25. In some embodiments, a crRNA sequence comprises at least 5, at least 6, at least 7, at least 8, at least 9, or at least 10 contiguous nucleotides of any one of the repeat sequences recited in TABLE 2 and TABLE 3, and at least 5, at least 6, at least 7, at least 8, at least 9, or at least 10 contiguous nucleotides of any one of the spacer sequences recited in TABLE 5-16, 18-19, and 23.

[0298] TABLE 2 and TABLE 3 provide illustrative crRNA sequences for use with the viral vectors and methods described herein. In some embodiments, the crRNA of TABLE 2 and TABLE 3 can be combined with the spacer sequences described herein, for targeting an effector protein described herein to the TRAC gene, the B2M gene or the CIITA gene. In some embodiments, the crRNA sequence comprises at least 70%, at least 80%, at least 90%, at least 92%, at least 95%, at least 97%, or at least 99%, or 100% sequence identity to any one of SEQ ID NO: 204-226, or a complement thereof. In some embodiments, the crRNA comprises a nucleotide sequence of any one of SEQ ID NO: 1588-1625 as shown in TABLE 3. In some embodiments, the nucleotide sequence of the crRNA is at least 65%, at least 70%, at least 75%, at least 80%, at least 85%, at least 90%, at least 95%, or 100% identical to any one of SEQ ID NO: 1588-1625. sgRNA

[0299] In some embodiments, a guide nucleic acid comprises a sgRNA. In some embodiments, a guide nucleic acid is a sgRNA. In some embodiments, a sgRNA comprises a first region (FR1) and a second region (FR2), wherein the FR1 comprises a handle sequence and the FR2 comprises a spacer sequence. In some embodiments, the handle sequence and the spacer sequences are directly connected to each other (e.g., covalent bond (phosphodiester bond)). In some embodiments, the handle sequence and the spacer sequence are connected by a linker.

[0300] In some embodiments, a sgRNA comprises one or more of a handle sequence, an intermediary sequence, a crRNA, a repeat sequence, a spacer sequence, a linker, or combinations thereof. For example, a sgRNA comprises a handle sequence and a spacer sequence; an intermediary sequence and an crRNA; an intermediary sequence, a repeat sequence and a spacer sequence; and the like.

[0301] In some embodiments, a sgRNA comprises an intermediary sequence and an crRNA. In some embodiments, an intermediary sequence is 5′ to a crRNA in an sgRNA. In some embodiments, a sgRNA comprises a linked intermediary sequence and crRNA. In some embodiments, an intermediary sequence and a crRNA are linked in an sgRNA directly (e.g., covalently linked, such as through a phosphodiester bond) In some embodiments, an intermediary sequence and a crRNA are linked in an sgRNA by any suitable linker, examples of which are provided herein.

[0302] In some embodiments, a sgRNA comprises a handle sequence and a spacer sequence. In some embodiments, a handle sequence is 5′ to a spacer sequence in an sgRNA. In some embodiments, a sgRNA comprises a linked handle sequence and spacer sequence. In some embodiments, a handle sequence and a spacer sequence are linked in an sgRNA directly (e.g., covalently linked, such as through a phosphodiester bond) In some embodiments, a handle sequence and a spacer sequence are linked in an sgRNA by any suitable linker, examples of which are provided herein.

[0303] In some embodiments, a sgRNA comprises an intermediary sequence, a repeat sequence, and a spacer sequence. In some embodiments, an intermediary sequence is 5′ to a repeat sequence in an sgRNA. In some embodiments, a sgRNA comprises a linked intermediary sequence and repeat sequence. In some embodiments, an intermediary sequence and a repeat sequence are linked in an sgRNA directly (e.g., covalently linked, such as through a phosphodiester bond) In some embodiments, an intermediary sequence and a repeat sequence are linked in an sgRNA by any suitable linker, examples of which are provided herein. In some embodiments, a repeat sequence is 5′ to a spacer sequence in an sgRNA. In some embodiments, a sgRNA comprises a linked repeat sequence and spacer sequence. In some embodiments, a repeat sequence and a spacer sequence are linked in an sgRNA directly (e.g, covalently linked, such as through a phosphodiester bond) In some embodiments, a repeat sequence and a spacer sequence are linked in an sgRNA by any suitable linker, examples of which are provided herein.

[0304] In some embodiments, a sgRNA comprises a nucleotide sequence that is at least 65%, at least 70%, at least 75%, at least 80%, at least 85%, at least 90%, at least 95%, at least 97%, or at least 98%, at least 99%, or 100% identical to any one of the sequences recited in TABLE 17,26 and 36. In a single nucleic acid system, any one of the sequences recited in TABLE 3 can be combined with any one of the sequences recited in TABLE 4 to form a handle sequence, wherein the handle sequence upon combining with the spacer sequences described herein forms a sgRNA. For example, in some embodiments, the crRNA and tracrRNA sequence of TABLE 3 and TABLES 4 can be combined to form sgRNA, when combined with the spacer sequences described herein, for targeting an effector protein described herein to the TRAC gene, the B2M gene or the CIITA gene. In such embodiments, the tracrRNA sequence comprises a nucleotide sequence of any one of SEQ ID NO: 385-440 as shown in TABLE 4. In some embodiments, the nucleotide sequence of the tracrRNA sequence is at least 65%, at least 70%, at least 75%, at least 80%, at least 85%, at least 90%, at least 95%, or 100% identical to any one of SEQ ID NO: 385-440.

### A Dual Nucleic Acid System

[0305] In a dual nucleic acid system, an effector protein is enabled to have a binding and/or nuclease activity on a target nucleic acid, by a tracrRNA or a tracrRNA-crRNA duplex. In some embodiments, compositions, systems and methods described herein comprise a dual nucleic acid system comprising a crRNA or a nucleotide sequence encoding the crRNA, a tracrRNA or a nucleotide sequence encoding the tracrRNA, and one or more effector protein or a nucleotide sequence encoding the one or more effector protein, wherein the crRNA and the tracrRNA are separate, unlinked molecules, wherein a repeat hybridization region of the tracrRNA is capable of hybridizing with an equal length portion of the crRNA to form a tracrRNA-crRNA duplex, wherein the equal length portion of the crRNA does not include a spacer sequence of the crRNA, and wherein the spacer sequence is capable of hybridizing to a target sequence of the target nucleic acid. In the dual nucleic acid system having a complex of the guide nucleic acid, tracrRNA, and the effector protein, the effector protein is transactivated by the tracrRNA. In other words, activity of effector protein requires binding to a tracrRNA molecule. In some embodiments, the dual nucleic acid system comprises a guide nucleic acid and a tracrRNA, wherein the tracrRNA is an additional nucleic acid capable of at least partially hybridizing to the first region of the guide nucleic acid. In some embodiments, the tracrRNA or additional nucleic acid is capable of at least partially hybridizing to the 5′ end of the second region of the guide nucleic acid.

[0306] The tracrRNA can comprise deoxyribonucleosides in addition to ribonucleosides. The tracrRNA can be separate from but form a complex with a guide nucleic acid. In some embodiments, the guide nucleic acid and the tracrRNA are separate polynucleotides. A tracrRNA can comprise a repeat hybridization region and a hairpin region. The repeat hybridization region can hybridize to all or part of the sequence of the repeat of a guide nucleic acid. The repeat hybridization region can be positioned 3′ of the hairpin region. The hairpin region can comprise a first sequence, a second sequence that is reverse complementary to the first sequence, and a stem-loop linking the first sequence and the second sequence.

[0307] In some embodiments, the length of the tracrRNA is not greater than 50, 56, 68, 71, 73, 95, or 105 linked nucleotides. In some embodiments, the length of a tracrRNA is about 30 to about 120 linked nucleotides. In some embodiments, the length of a tracrRNA is about 50 to about 105, about 50 to about 95, about 50 to about 73, about 50 to about 71, about 50 to about 68, or about 50 to about 56 linked nucleotides. In some embodiments, the length of a tracrRNA is 56 to 105 linked nucleotides, from 56 to 105 linked nucleotides, 68 to 105 linked nucleotides, 71 to 105 linked nucleotides, 73 to 105 linked nucleotides, or 95 to 105 linked nucleotides. In some embodiments, the length of a tracrRNA is 40 to 60 nucleotides. In some embodiments, the length of the tracrRNA is 50, 56, 68, 71, 73, 95, or 105 linked nucleotides. In some embodiments, the length of the tracrRNA is 50 nucleotides.

[0308] An exemplary tracrRNA can comprise, from 5′ to 3′, a 5′ region, a hairpin region, a repeat hybridization region, and a 3′ region. In some embodiments, the 5′ region can hybridize to the 3′ region. In some embodiments, the 5′ region does not hybridize to the 3′ region. In some embodiments, the 3′ region is covalently linked to the guide nucleic acid (e.g., through a phosphodiester bond). In some embodiments, a tracrRNA can comprise an unhybridized region at the 3′ end of the tracrRNA. The unhybridized region can have a length of about 1, about 2, about 3, about 4, about 5, about 6, about 7, about 8, about 9, about 10, about 12, about 14, about 16, about 18, or about 20 linked nucleotides. In some embodiments, the length of the un-hybridized region is 0 to 20 linked nucleotides.

[0309] In some embodiments, the guide nucleic acid does not comprise a tracrRNA. In some embodiments, an effector protein does not require a tracrRNA to locate and/or cleave a target nucleic acid. In some embodiments, the guide nucleic acid comprises a repeat region and a spacer region, wherein the repeat region binds to the effector protein and the spacer region hybridizes to a target sequence of the target nucleic acid. The repeat sequence of the guide nucleic acid can interact with an effector protein, allowing for the guide nucleic acid and the effector protein to form an RNP complex.

[0310] TABLE 3 and TABLES 4 provides exemplary combination comprising effector proteins, crRNAs (repeat sequence), and tracrRNAs. Each row in TABLE 3 and TABLES 4 represents an exemplary combination. Moreover, in a dual nucleic acid system, a tracrRNA comprising any one of the nucleotide sequence recited in TABLE 4, and a guide RNA comprising any one of repeat sequence of the crRNA recited in TABLE 3 can be combined with the spacer sequences described herein for targeting an effector protein described herein to the TRAC gene, the B2M gene or the CIITA gene. In such embodiments, the tracrRNA comprises a nucleotide sequence of any one of SEQ ID NO: 385-440 as shown in TABLE 4. In some embodiments, the nucleotide sequence of the tracrRNA is at least 65%, at least 70%, at least 75%, at least 80%, at least 85%, at least 90%, at least 95%, or 100% identical to any one of SEQ ID NO: 385-440.

### Donor Nucleic Acid

[0311] In some embodiments, viral vectors provided herein comprise a nucleotide sequence that comprises a donor nucleic acid, wherein the donor nucleic acid encodes a CAR. Introduction of such a donor nucleic acid into a T cell, as described herein, generates a “CAR T cell.” In general, a CAR comprises an antigen binding domain that is expressed on the surface of the CAR T-cell. The antigen binding domain can be considered to be an extracellular domain. In general, the antigen binding domain binds an antigen on a target cell. The antigen binding domain can comprise an antibody. The antibody can comprise an immunoglobulin or antigen binding fragment thereof. The antibody can be a polyclonal antibody or a monoclonal antibody. The antigen binding domain can comprise or consist essentially of an antigen binding antibody fragment, referred to simply herein as an antibody fragment. Non-limiting examples of antibody fragments include Fab, Fab′, F(ab′)2, Fv fragments, scFv antibody fragments, disulfide-linked Fvs (sdFv), a Fd fragment consisting of the VH and CHI domains, linear antibodies, single domain antibodies such as sdAb (either VL or VH), and isolated CDRs.

[0312] In some embodiments, the antigen binding portion of the CAR binds to an antigen that is specific to a pathogen. In some embodiments, the antigen binding portion of the CAR recognizes an antigen expressed on the surface of the infected cell due to the infection/pathogen (e.g., hepatitis virus, human immunodeficiency virus, influenza virus and corona virus).

[0313] In some embodiments, the antigen binding portion of the CAR binds an antigen expressed by a cancer cell. Such an antigen expressed by a cancer cell can be a result of the cell harboring one or more mutations that results in unchecked proliferation of the cancer cell. In some embodiments, the antigen expressed by a cancer cell is selected from the group consisting of ADRB3, AKAP-4,ALK, Androgen receptor, B7H3, BCMA, BORIS, BST2, CAIX, CD 179a, CD123, CD171, CD19, CD20, CD22, CD24, CD30, CD300LF, CD33, CD38, CD44v6, CD72, CD79a, CD79b, CD97, CEA, CLDN6, CLEC12A, CLL-1, CS-1, CXORF61, CYP1B1, Cyclin B 1, E7, EGFR, EGFRvIII, ELF2M, EMR2, EPCAM, ERBB2 (Her2/neu), ERG (TMPRSS2 ETS fusion gene), ETV6-AML, EphA2, Ephrin B2, FAP, FCAR, FCRL5, FLT3, Folate receptor alpha, Folate receptor beta, Fos-related antigen 1, Fucosyl GMl, GD2, GD3, GM3, GPC3, GPR20, GPRC5D, GloboH, HAVCR1, HMWMAA, HPV E6, IGF-I receptor, IL-13Ra2, IL-11Ra, KIT, LAGE-1a, LAIR1, LCK, LILRA2, LMP2, LY6K, LY75, LewisY, MAD-CT-1, MAD-CT-2, MAGE A1, MAGE-A1, ML-IAP, MUC1, MYCN, MelanA/MARTl, Mesothelin, NA17, NCAM, NY-BR-1, NY-ESO-1, OR51E2, OY- TES 1, PANX3, PAP, PAX3, PAX5, PCTA-1/Galectin 8, PDGFR-beta, PLAC1, PRSS21, PSCA, PSMA, Polysialic acid, Prostase, RAGE-1, ROR1, RU1, RU2, Ras mutant, RhoC, SART3, SSEA-4, SSX2, TAG72, TARP, TEM1/CD248, TEM7R, TGS5, TRP-2, TSHR, Tie 2, Tn Ag, UPK2, VEGFR2, WT1, XAGE1, and IGLL1.

[0314] In some embodiments, the donor nucleic acid includes, in addition to the nucleotide sequence encoding a CAR, one or more nucleotide sequences for directing integration of the donor nucleic acid into the TRAC gene of the target cell (e.g., T cell). These one or more nucleotide sequences can be used by the molecular machinery (homologous recombination (e.g., homology directed repair (HDR)) or non-homologous end joining (NHEJ)) present in the target cell (either naturally present or recombinantly introduced) for directing integration of the donor nucleic acid into the TRAC gene. In some embodiments, a donor nucleic acid comprises one nucleotide sequence to one side (5′ or 3′) of the nucleotide sequence encoding a CAR, such that integration of the donor nucleic acid is selective for the TRAC gene of the target cell. In some embodiments, such nucleotide sequences are located on both sides (5′ and 3′) of the nucleotide sequence encoding a CAR.

[0315] In some embodiments, the one or more nucleotide sequences for directing integration of the donor nucleic acid into the TRAC gene are identical or complementary to a target sequence in the TRAC gene. Exemplary lengths of identity or complementarity between the TRAC gene and the nucleotide sequence for directing integration include at least 5 nucleotides, at least 10 nucleotides, at least 15 nucleotides, at least 20 nucleotides, at least 25 nucleotides, or at least 30 nucleotides. In some embodiments, the length of identity or complementarity is no more than about 30, no more than about 40, or no more than about 50 nucleotides. In some embodiments, the one or more nucleotide sequences for directing integration share identity or complementarity with a target sequence in the TRAC gene that is about 5 nucleotides to about 50 nucleotides, about 10 nucleotides to about 50 nucleotides, about 15 nucleotides to about 50 nucleotides, about 20 nucleotides to about 50 nucleotides, about 25 nucleotides to about 50 nucleotides, about 30 nucleotides to about 50 nucleotides, about 5 nucleotides to about 40 nucleotides, about 10 nucleotides to about 40 nucleotides, about 15 nucleotides to about 40 nucleotides, about 20 nucleotides to about 40 nucleotides, about 25 nucleotides to about 40 nucleotides, about 30 nucleotides to about 40 nucleotides, about 5 nucleotides to about 30 nucleotides, about 10 nucleotides to about 30 nucleotides, about 15 nucleotides to about 30 nucleotides, about 20 nucleotides to about 30 nucleotides, about 5 nucleotides to about 25 nucleotides, about 10 nucleotides to about 25 nucleotides, about 15 nucleotides to about 25 nucleotides, about 20 nucleotides to about 25 nucleotides, about 5 nucleotides to about 20 nucleotides, about 10 nucleotides to about 20 nucleotides, about 15 nucleotides to about 20 nucleotides, about 5 nucleotides to about 15 nucleotides, about 10 nucleotides to about 15 nucleotides, or about 5 nucleotides to about 10 nucleotides in length.

[0316] In general, a CAR comprises an intracellular binding domain. The intracellular binding domain generally contributes to the activation of the CAR T-cell when the antigen binding domain of the CAR associates with its respective antigen. In some embodiments, the intracellular signaling domain of said CAR comprises a functional signaling domain of a protein selected from the group consisting of 4-1BB (CD137), B7-H3, BAFFR, BLAME (SLAMF8), CD100 (SEMA4D), CD103, CD150, CD160, CD160 (BY55), CD162 (SELPLG), CD18, CD19, CD2, CD229, CD27, CD28, CD29, CD30, CD4, CD40, CD49D, CD49a, CD49f, CD69, CD7, CD84, CD8alpha, CD8beta, CD96, CDS, CD11a, CD11b, CD11c, CD11d, CEACAM1, CRTAM, DNAM1 (CD226), GADS, GITR, HVEM (LIGHTR), IA4, ICAM-1, ICOS, IL2R beta, IL2R gamma, IL7R alpha, ITGA4, ITGA4, ITGA6, ITGAD, ITGAE, ITGAL, ITGAM, ITGAX, ITGB 1, ITGB2, ITGB7, LAT, LFA-1, LFA-1, LIGHT, LTBR, NKG2C, NKp30, NKp44, NKp46, NKp80 (KLRF1), OX40, PAG/Cbp, PD-1, PSGL1, SLAMF1, SLAMF4, SLAMF6, SLAMF7, SLP-76, TNFR2, TRANCE/RANKL, VLA1, and VLA-6.

[0317] In some embodiments, the donor nucleic acid encoding the CAR has a length of about 500 nucleotides to about 1,000 nucleotides, about 1,000 nucleotides to about 1,500 nucleotides, about 1,500 nucleotides to about 2,000 nucleotides, or about 2,000 nucleotides to about 2,500 nucleotides. In some embodiments, the donor nucleic acid has a length of about 1,000 nucleotides to about 2,000 nucleotides. In some embodiments, the length of the donor nucleic acid is about 2,000 nucleotides to about 2,500 nucleotides. In some embodiments, the length of the donor nucleic acid is about 1,000 nucleotides to about 1,200 nucleotides, about 1,200 nucleotides to about 1,600 nucleotides, about 1,600 nucleotides to about 2,000 nucleotides, about 1,200 nucleotides to about 1,400 nucleotides, about 1,400 nucleotides to about 1,600 nucleotides, about 1,600 nucleotides to about 1,800 nucleotides, about 1,800 nucleotides to about 2,000 nucleotides.

[0318] In some embodiments, the donor nucleic acid of a viral vector described herein includes a sequence of nucleotides that will be or has been introduced into a cell following introduction of the viral vector. The donor nucleic acid can be introduced into the cell by any mechanism, including transfecting or transducing the viral vector. The viral vector, once introduced into the cell, can be integrated into the genome of the cell or remain as an episomal plasmid or viral genome. When used in reference to the activity of an effector protein, the donor nucleic acid includes a sequence of nucleotides that will be or has been inserted at the site of cleavage by the effector protein. When used in reference to homologous recombination, the donor nucleic acid can be a sequence of DNA that serves as a template in the process of homologous recombination, which can carry the modification that is to be or has been introduced into the target nucleic acid. By using this donor nucleic acid as a template, the genetic information, including the modification, is copied into the target nucleic acid by way of homologous recombination.

### Pharmaceutical Compositions

[0319] Disclosed herein, in some aspects, are pharmaceutical composition comprising a vector (e.g., a non-viral vector comprising a sequence encoding the genome editing tools described herein; a viral vector or a viral particle comprising a viral vector, wherein the viral vector comprises a sequence encoding the genome editing tools described herein); and a pharmaceutically acceptable excipient, carrier or diluent. Non-limiting examples of pharmaceutically acceptable excipients, carriers and diluents include buffers (e.g., neutral buffered saline, phosphate buffered saline); carbohydrates (e.g., glucose, mannose, sucrose, dextran, mannitol); polypeptides or amino acids (e.g., glycine); antioxidants; chelating agents (e.g., EDTA, glutathione); adjuvants (e.g., aluminum hydroxide); and preservatives.

[0320] In some aspects, also provided herein is a pharmaceutical composition comprising CAR T cell or a population of CAR T cells as described herein; and a pharmaceutically acceptable excipient, carrier or diluent. Such an excipient, carrier or diluent, in this context, include those that facilitate storage of the cells in a freezer, such a dimethyl sulfoxide, HSA and alternative solvents/excipients as cryopreservation agents, and other excipients, such as sodium chloride, dextrose, dextran 40, electrolytes (e.g., Plasma-Lyte A), polyampholytes (e.g., methacrylates or poly-lysine), pore-forming amphipathic pH-responsive polymers facilitating the intracellular entry of non-reducing cryoprotectant sugars (e.g., comb-like pseudopeptides harbouring alkyl side chains that mimic fusogenic proteins), dimethyl sulfoxide, 1,2-propanediol, glycerol, sorbitol, poly(ethylene glycol) 600, trehalose, creatin, isoleucine, maltose, and sucrose, including those described by van der Walle et al., (2021), Pharmaceutics 13:1317, and Sheskey et al., Handbook of Pharmaceutical Excipients, 9th ed., Pharmaceutical Press: London, U K, 2020.

### Methods of Producing CAR T Cells

[0321] Provided herein are methods of producing an immunologically compatible CAR T cell or a population of such cells. In general, the compositions (e.g., viral vectors, viral particles, pharmaceutical composition, RNP complexes of effector proteins and guide nucleic acids) and systems disclosed herein can be used to produce an immunologically compatible CAR T cell or a population of such cells. Use of such effector proteins, multimeric complexes thereof and systems described herein can provide for modifying a target nucleic acid (e.g., the TRAC gene, the B2M gene and the CIITA gene) present in the starting T cell by the generation of a mutation (e.g., indel) into the target nucleic acid. Additionally, in the context of a donor nucleic acid, such compositions (e.g., viral vectors, viral particles, non-viral vectors, pharmaceutical composition, RNP complexes of effector proteins and guide nucleic acids) and systems can be used to specifically introduce the donor nucleic acid encoding a CAR into the TRAC gene of a starting T cell, thereby generating a CAR T cell. The generation of a mutation (e.g., indel) into a target nucleic acid (e.g., B2M gene and/or CIITA gene) and introduction of the donor nucleic acid into the TRAC gene can comprise one or more effector protein cleaving the target nucleic acid, thereby leading to deletion of one or more nucleotides of the target nucleic acid and/or insertion one or more nucleotides into the target nucleic acid (e.g., inserting the donor nucleic acid encoding a CAR), or otherwise mutating one or more nucleotides of the target nucleic acid, which leads to preventing the expression (e.g., gene silencing or removal of all expression (knock out)) of the protein, polypeptide or peptide encoded by the target nucleic acid (e.g., T-cell receptor alpha-constant, beta-2 microglobulin, and/or class II major histocompatibility complex transactivator). Such mutations lead to production of an immunologically compatible CAR T cell. Moreover, the methods provided herein have a particular advantage to the methods known in the art for generating a CAR T cell, in that the methods provided herein provide for the generation of an immunologically compatible CAR T cell in a rapid and cost effective fashion by use of one or two contacting steps with the compositions (e.g., viral vectors, viral particles, non-viral vectors, pharmaceutical composition, RNP complexes of effector proteins and guide nucleic acids) disclosed herein followed by a single culturing step for generation of the CAR T immunologically compatible CAR T cell. Such methods require no other agent that alters the CAR T-cell's ability to recognize a target cell or pathogen or autoreactivity of the CAR T-cell in a subject.

[0322] Accordingly, in some aspects, provided herein is a method of producing an immunologically compatible CAR T cell comprising: contacting ex vivo a T cell with a viral vector described herein, a viral particle described herein, or the pharmaceutical composition comprising a viral vector or a viral particle described herein for a sufficient period of time to allow for viral transduction of the T cell; and culturing the T cell for a sufficient period of time for indels to occur in the TRAC gene, B2M gene and CIITA gene and for integration of the donor nucleic acid into the TRAC gene, thereby producing the immunologically compatible CAR T cell. Similarly, also provided herein, in some aspects, is a method of producing a population of immunologically compatible CAR T cells comprising: contacting ex vivo a population of T cells with a viral vector described herein, a viral particle described herein, or the pharmaceutical composition comprising a viral vector or a viral particle described herein for a sufficient period of time to allow for viral transduction of T cells contained in the population; and culturing the population of T cells for sufficient period of time for indels to occur in the TRAC gene, B2M gene and CIITA gene and for integration of the donor nucleic acid into the TRAC gene, thereby producing the population of immunologically compatible CAR T cells.

[0323] Also provided herein is a method of producing an immunologically compatible CAR T cell comprising: contacting ex vivo a T cell with a viral vector or viral particle comprising a donor nucleic acid encoding the CAR for a sufficient period of time to allow for viral transduction of the T cell; contacting ex vivo the T cell with at least three different RNP complexes comprising an effector protein and a guide nucleic acid as described herein for targeting the effector protein to the TRAC gene, B2M gene and CIITA gene; and culturing the T cell for a sufficient period of time for indels to occur in the TRAC gene, B2M gene and CIITA gene and for integration of the donor nucleic acid into the TRAC gene, thereby producing the immunologically compatible chimeric antigen receptor (CAR) T cell. Similarly, also provided herein, in some aspects, is a method of producing a population of immunologically compatible CAR T cells comprising: contacting ex vivo a population of T cells with a viral vector or viral particle comprising a donor nucleic acid encoding the CAR for a sufficient period of time to allow for viral transduction of T cells contained in the population; contacting ex vivo the population of T cells with at least three different RNP complexes as described herein for targeting the effector protein to the TRAC gene, B2M gene and CIITA gene; and culturing the population of T cells for sufficient period of time for indels to occur in the TRAC gene, B2M gene and CIITA gene and for integration of the donor nucleic acid into the TRAC gene, thereby producing the population of chimeric antigen receptor (CAR) T cells.

[0324] In some embodiments, an RNP used in the above method comprises an effector protein and a guide nucleic acid as described herein. For example, in some embodiments, the effector protein is an effector protein described herein and the guide nucleic acid comprises a sequence that is at least 90% identical or complementary to an equal length portion of a target sequence of a TRAC gene. In some embodiments, the effector protein is an effector protein described herein and the guide nucleic acid comprises a sequence that is at least 90% identical or complementary to an equal length portion of a target sequence of a B2M gene. In some embodiments, the effector protein is an effector protein described herein and the guide nucleic acid comprises a sequence that is at least 90% identical or complementary to an equal length portion of a target sequence of a CIITA gene. In some embodiments, contacting ex vivo the T cell with the RNP complexes described herein include electroporation, lipofection, or lipid nanoparticle (LNP) delivery of the RNP complexes to the T cell(s).

[0325] In some embodiments, the methods provided herein include contacting the T cells ex vivo with a viral vector described herein, a viral particle described herein, a non-viral vector described herein or the pharmaceutical composition comprising a viral vector, a viral particle, or a non-viral vector described herein for a specified period of time that allows for the transduction of the T cell(s). In some embodiments, such contacting comprises at least about 1 hour, at least about 2 hours, at least about 3 hours, at least about 4 hours, at least about 5 hours or at least about 6 hours. Such contacting can also be limited to a specific period of time, such as the contacting being no more than 10 hours, no more than 9 hours, no more than 8 hours, no more than 7, hours, no more than 6 hours, no more than 5 hours, no more than 4 hours, no more than 3 hours or no more than 2 hours. Accordingly, the period for contacting can be for about 1 hour to about 10 hours, about 1 hour to about 9 hours, about 1 hour to about 8 hours, about 1 hour to about 7 hours, about 1 hour to about 6 hours, about 1 hour to about 5 hours, about 1 hour to about 4 hours, about 1 hour to about 3 hours, about 1 hour to about 2 hours, about 2 hour to about 10 hours, about 2 hour to about 9 hours, about 2 hour to about 8 hours, about 2 hour to about 7 hours, about 2 hour to about 6 hours, about 2 hour to about 5 hours, about 2 hour to about 2 hours, or about 2 hour to about 3 hours.

[0326] The ex vivo contacting of the T cell or T cell population with a viral vector described herein, a viral particle described herein, a non-viral vector described herein, or the pharmaceutical composition comprising a viral vector, a viral particle, or a non-viral vector described herein can be performed using methods described herein (e.g., Example 14) or a method well known in the art, such as the methods described by Viney et al., (2021) and J Virol., 95(7):e02023-20, Nawaz, et al., (2021), Blood Cancer J., 11:119, each of which is incorporated by reference in its entirety.

[0327] Methods of introducing a nucleic acid and/or protein into a host cell (e.g., T cell) are known in the art, and any convenient method may be used to introduce a subject nucleic acid (e.g., an expression construct/vector) into a target cell (e.g., T cell). Suitable methods include, e.g., viral infection, transfection, conjugation, protoplast fusion, lipofection, electroporation, calcium phosphate precipitation, polyethyleneimine (PEI)-mediated transfection, DEAE-dextran mediated transfection, liposome-mediated transfection, particle gun technology, calcium phosphate precipitation, direct micro injection, nanoparticle-mediated nucleic acid delivery (see, e.g., Panyam et al. Adv Drug Deliv Rev. 2012 Sep. 13. pii: S0169-409X(12)00283-9. doi: 10.1016/j.addr.2012.09.023), and the like. In some embodiments, molecules of interest, such as nucleic acids of interest, are introduced to T cells. In some embodiments, an effector protein is introduced to T cells. In some embodiments, vectors, such as lipid particles and/or viral vectors may be introduced to T cells. Introduction may be for contact with a host or for assimilation into the host, for example, introduction into T cells.

[0328] In some embodiments, an effector protein may be provided as RNA. The RNA may be provided by direct chemical synthesis or may be transcribed in vitro from a DNA (e.g., encoding the effector protein). Once synthesized, the RNA may be introduced into T cells by way of any suitable technique for introducing nucleic acids into cells (e.g., microinjection, electroporation, transfection, etc.). In some embodiments, introduction of one or more nucleic acid may be through the use of a vector and/or a vector system, accordingly, in some embodiments, compositions and system described herein comprise a vector and/or a vector system.

[0329] Vectors may be introduced directly to T cells. In some embodiments, T cells may be contacted with one or more vectors as described herein, and in some embodiments, said vectors are taken up by the cells. Methods for contacting T cells with vectors include but are not limited to electroporation, calcium chloride transfection, microinjection, lipofection, micro-injection, contact with the T cells or particle that comprises a molecule of interest, or a package of T cells or particles that comprise molecules of interest.

[0330] Components described herein may also be introduced directly to T cells. For example, an engineered guide nucleic acid may be introduced to T cells, specifically introduced into T cells. Methods of introducing nucleic acids, such as RNA into T cells include, but are not limited to direct injection, transfection, or any other method used for the introduction of nucleic acids.

[0331] In some embodiments, the methods provided herein include contacting the T cells ex vivo with a specific amount of viral vector or viral particles. In general, the amount of viral vector or vial particles is identified in reference to the number of cells that are present in the culturing containing the T cells, termed a multiplicity of infection (MOI). Accordingly, in some embodiments, the method provided herein comprises using an MOI of viral vector or viral particle to T cell of about 1×10⁴, about 5×10⁴, about 1×10⁵, about 5×10⁵, about 1×10⁶, about 5×10⁶, about 1×10⁷, about 5×10⁷, about 1×10⁸, about 5×10⁸, about 1×10⁹, about 5×10⁹, about 1×10¹⁰, or about 5×10¹⁰. In some embodiments, the MOI is about 1×10⁴. In some embodiments, the MOI is about about 5×10⁴. In some embodiments, the MOI is about 1×10⁵. In some embodiments, the MOI is about 5×10⁴. In some embodiments, the MOI is about 1×10⁶. In some embodiments, the MOI is about 5×10⁶. In some embodiments, the MOI is about 1×10⁷. In some embodiments, the MOI is about 5×10⁷. In some embodiments, the MOI is about 1×10⁸. In some embodiments, the MOI is about 5×10⁸. In some embodiments, the MOI is about 1×10⁹. In some embodiments, the MOI is about 5×10⁹. In some embodiments, the MOI is about 1×10¹⁰. In some embodiments, the MOI is about 5×10¹⁰.

[0332] In some embodiments, the methods provided herein, once completed with the contacting step(s), are cultured for a period of time sufficient for the effector protein, guide nucleic acids and donor nucleic acid to generate indels in the TRAC gene, B2M gene, and CIITA gene and for integration of the donor nucleic acid into the TRAC gene. Accordingly, in some embodiments, the culturing is for at least 1 day, at least 2 days, at least 3 days, at least 4 days, at least 5 days, or at least 6 days. Such culturing can also be limited to a specific period of time, such as the culturing being no more than 7 days, no more than 8 days, no more than 9 days, no more than 10 days, no more than 11 days, no more than 12 days, no more than 13 days, no more than 14 days, no more than 15 days, no more than 16 days, no more than 17 days, no more than 18 days, no more than 19 days, no more than 20 days, or no more than 21 days.

[0333] In some embodiments, the methods provided herein for generating a population of T cells includes a period of time for culturing the T cells such that a certain percentage of T cells include mutations (e.g., indels) in the TRAC gene, B2M gene and CIITA gene and integration of the donor nucleic acid into the TRAC gene. Accordingly, in some embodiments, the period of time is sufficient for at least 50%, at least 51%, at least 52%, at least 53%, at least 54%, at least 55%, at least 56%, at least 57%, at least 58%, at least 59%, at least 60%, at least 61%, at least 62%, at least 63%, at least 64%, at least 65%, at least 66%, at least 67%, at least 68%, at least 69%, at least 70%, at least 71%, at least 72%, at least 73%, at least 74%, at least 75%, at least 76% at least 77%, at least 78%, at least 79%, at least 80% of the T cells contained in the population to have mutations (e.g., indels) occur in the TRAC gene, B2M gene and CIITA gene and integration of the donor nucleic acid. In some embodiments, the period of time is sufficient for at least 50% of the T cells contained in the population to have indels occur in the TRAC gene, B2M gene and CIITA gene and integration of the donor nucleic acid. In some embodiments, the period of time is sufficient for at least 55% of the T cells contained in the population to have indels occur in the TRAC gene, B2M gene and CIITA gene and integration of the donor nucleic acid. In some embodiments, the period of time is sufficient for at least 60% of the T cells contained in the population to have indels occur in the TRAC gene, B2M gene and CIITA gene and integration of the donor nucleic acid. In some embodiments, the period of time is sufficient for at least 65% of the T cells contained in the population to have indels occur in the TRAC gene, B2M gene and CIITA gene and integration of the donor nucleic acid. In some embodiments, the period of time is sufficient for at least 75% of the T cells contained in the population to have indels occur in the TRAC gene, B2M gene and CIITA gene and integration of the donor nucleic acid. In some embodiments, the period of time is sufficient for at least 80% of the T cells contained in the population to have indels occur in of TRAC gene, B2M gene and CIITA gene and integration of the donor nucleic acid.

[0334] Methods for assessing the number of cells in the population having the specified mutations include the methods described herein (e.g., Example 14) or any other method well known in the art, such as sequencing, use of photocleavable guide RNAs, and qPCR as further described by Zou et al., (2021) STAR Protoc., 2(4):100909 and Li et al., (2019), Sci Rep, 9:18877, each of which is incorporated by reference in its entirety.

[0335] In some embodiments, the methods provided herein end with the freezing the CAR T cell or CAR T cell population. Such freezing provides for the long term storage of the CAR T cell or CAR T cell population and future use. Freezing of the CAR T cell or CAR T cell population can be performed using methods well known in the art for preserving the cells, especially T cells, including the addition of cryoprotectants for preserving post-thaw proliferative capacity, phenotype and functional response. Exemplary cryoprotectants and methods for preserving such functions are described in Luo et al., (2017), Cryobiology. 79:65-70, which is incorporated by reference in its entirety.

[0336] Because of the limited number of contacting and culturing steps that are required by the methods provided herein, the number of T cells that are killed are greatly reduced compared to other methods known in the art. Accordingly, in some embodiments, the number of T cells that are killed during the method is no more than 1%, 2%, 3%, 4%, 5%, 6%, 7%, 8%, 9%, 10%, 11%, 12%, 13%, 14%, 15% based on the number of T cells present in the population at the start of the method. In some embodiments, the number of cells killed is less than 1%. In some embodiments, the number of T cells that are killed is no more than 3%. In some embodiments, the number of T cells that are killed is no more than 5%. In some embodiments, the number of T cells that are killed is no more than 10%. In some embodiments, the number of T cells that are killed is no more than 15%.

[0337] In some embodiments, effector protein mediated cleavage (single-stranded or double-stranded) is site-specific, meaning cleavage occurs at a specific site in the target nucleic acid, often within the region of the target nucleic acid that hybridizes with the guide nucleic acid spacer sequence. In some embodiments, the effector proteins introduce a single-stranded break in a target nucleic acid to produce a cleaved nucleic acid. In some embodiments, the effector protein is capable of introducing a break in a single stranded RNA (ssRNA). The effector protein may be coupled to a guide nucleic acid that targets a particular region of interest in the ssRNA. In some embodiments, the target nucleic acid, and the resulting cleaved nucleic acid is contacted with a nucleic acid for homologous recombination (e.g., homology directed repair (HDR)) or non-homologous end joining (NHEJ). In some embodiments, a double-stranded break in the target nucleic acid may be repaired (e.g., by NHEJ or HDR) without insertion of a donor template, such that the repair results in an indel in the target nucleic acid at or near the site of the double-stranded break. In some embodiments, an indel, sometimes referred to as an insertion-deletion or indel mutation, is a type of genetic mutation that results from the insertion and/or deletion of one or more nucleotide in a target nucleic acid. An indel may vary in length (e.g., 1 to 1,000 nucleotides in length) and be detected using methods well known in the art, including sequencing. If the number of nucleotides in the insertion/deletion is not divisible by three, and it occurs in a protein coding region, it is also a frameshift mutation. Indel percentage is the percentage of sequencing reads that show at least one nucleotide has been mutation that results from the insertion and/or deletion of nucleotides regardless of the size of insertion or deletion, or number of nucleotides mutated. For example, if there is at least one nucleotide deletion detected in a given target nucleic acid, it counts towards the percent indel value. As another example, if one copy of the target nucleic acid has one nucleotide deleted, and another copy of the target nucleic acid has 10 nucleotides deleted, they are counted the same. This number reflects the percentage of target nucleic acids that are edited by a given effector protein.

[0338] In some embodiments, methods described herein cleave a target nucleic acid at one or more locations to generate a cleaved target nucleic acid. In some embodiments, the cleaved target nucleic acid undergoes recombination (e.g., NHEJ or HDR). In some embodiments, cleavage in the target nucleic acid may be repaired (e.g., by NHEJ or HDR) without insertion of a donor nucleic acid, such that the repair results in an indel in the target nucleic acid at or near the site of the cleavage site. In some embodiments, cleavage in the target nucleic acid may be repaired (e.g., by NHEJ or HDR) with insertion of a donor nucleic acid, such that the repair results in an indel in the target nucleic acid at or near the site of the cleavage site.

[0339] In some embodiments, the mutation (e.g., indel) introduced into the target nucleic acid results in gene silencing of the target nucleic acid. Such gene silencing, in some embodiments, reduces expression of the target nucleic acid by at least 10%, at least 20%, at least 30%, at least 40%, at least 50%, at least 60%, at least 70%, at least 80%, at least 90%, or at least 95%. In some embodiments, gene silencing is accomplished by transcriptional silencing or post-transcriptional silencing. In some embodiments, the mutation (e.g., indel) introduced into the target nucleic acid occurs in both alleles of the TRAC gene, B2M gene and CIITA gene.

### CAR T Cells, Kits and Systems

[0340] The methods described herein can be used to produce an immunologically compatible CAR T or a population of such cells. Accordingly, in some aspects, provided herein is an immunologically compatible CART cell produced by a method described herein. Similarly, in some aspects, provided herein is a population of CAR T cells produced by a method described herein.

[0341] In general, CAR T cells are T cells that express a CAR. A CAR T cell can be activated in the presence of its respective antigen on a target cell, resulting in the destruction of the target cell. In some embodiments, the CAR T cell expresses CD3. In some embodiments, the CAR T cell is a naïve T cell. In some embodiments, the CAR T cell is a T-helper cells (CD4⁺ cell). In some embodiments, the CAR T cell is cytotoxic T-cells (CD8⁺ cell.) In some embodiments, the CAR T cell expresses CD4 (also referred to as a “CD4+ T cell”). In some embodiments, the CAR T cell expresses CD8 (also referred to as a “CD8+ T cell”). In some embodiments, the CAR T cell expresses CD4 and CD8 (also referred to as a “CD4+CD8+ T cell”). In some embodiments, the CAR T cell is natural killer T-cell. In some embodiments, the CAR T cell is a T-regulatory cell (T-reg).

[0342] Also provided herein, in some aspects, an immunologically compatible CAR T cell comprising: indels in each of the TRAC gene, the B2M gene, and the CIITA gene. Because of the use of the effector proteins and the guide nucleic acids described herein, in some embodiments, such a CAR T cell will include idels in each of the the TRAC gene, the B2M gene, and the CIITA gene within proximity of a PAM sequence of an effector protein described herein. Moreover, in some embodiments, such a CAR T cell will include integration of a donor nucleic acid encoding a chimeric antigen receptor (CAR) into the TRAC gene.

[0343] As described herein, effector proteins described herein can recognize specific PAM sequences. Because PAM sequences will direct the nuclease activity of the effector protein to be within or adjacent to the PAM sequences, the indels generated by the nuclease activity of the effector protein will be within proximity of a PAM sequence of an effector protein described herein. Accordingly, in some embodiments, an indel described herein will be within proximity of a PAM sequence selected from a PAM sequence comprising 5′-CTT-3′, 5′-CC-3′, 5′-TCG-3′, 5′-GCG-3′, 5′-TTG-3′, 5′-GTG-3′, 5′-ATTA-3′, 5′-ATTG-3′, 5′-GTTA-3′, 5′-GTTG-3′, 5′-TC-3′, 5′-ACTG-3′, 5′-GCTG-3′, 5′-TTC-3′, or 5′-TTT-3′. In some embodiments, an indel described herein will be within proximity of a PAM sequence comprising 5′-TBN-3′, wherein B is one or more of C, G, or T and N is any nucleotide. In some embodiments, an indel described herein will be within proximity of a PAM sequence comprising 5′-TTTN-3′, wherein N is any nucleotide. In some embodiments, an indel described herein will be within proximity of a PAM sequence comprising 5′-GTTK-3′, 5′-VTTK-3′, 5′-VTTS-3′, 5′-TTTS-3′ or 5′-VTTN-3′, wherein K is G or T, V is A, C or G, S is C or G, and N is any nucleotide.

[0344] In some embodiments, the CAR T cell provided herein comprises indels within a certain nucleotide length of the PAM sequence (either starting from the 5′ end or 3′ end of the PAM sequence, depending upon the indel location). Accordingly, in some embodiments, the indels described herein are within 10 nucleotides of the PAM sequence. In some embodiments, the indels described herein are within in some embodiments, the indels described herein are within 15 nucleotides of the PAM sequence. In some embodiments, the indels described herein are within in some embodiments, the indels described herein are within 20 nucleotides of the PAM sequence. In some embodiments, the indels described herein are within in some embodiments, the indels described herein are within 25 nucleotides of the PAM sequence. In some embodiments, the indels described herein are within in some embodiments, the indels described herein are within 30 nucleotides of the PAM sequence.

[0345] Another identifying characteristic of a CAR T cell provided herein is the location of the donor nucleic acid encoding a CAR. As described herein, use of an effector protein, guide nucleic acids and donor nucleic acid described herein, the donor nucleic acid of the CAR T cell will be in the TRAC gene. Moreover, integration of the TRAC gene can be guided by the genome editing components described here such that the sequence of the donor nucleic acid encoding the CAR is in line with the promoter of the endogenous TRAC gene. By such an integration, in some embodiments, expression of the donor nucleic acid is driven by an endogenous TRAC gene promotor of the T cell.

[0346] As described already, in some aspects, provided herein is a population of T cells comprising CAR T cells produced by a method described herein. Because of the efficiency of the methods provided herein, such a population T cells comprising the immunologically compatible CAR T cell described herein can have a high number of CAR T cells compared to the number of T cells in the population that have not been made into a CAR T cell. Accordingly, in some embodiments, at least 50% of the T cells contained in the population are an immunologically compatible CAR T cell described herein. In some embodiments, at least 55% of the T cells contained in the population are an immunologically compatible CAR T cell described herein. In some embodiments, at least 60% of the T cells contained in the population are an immunologically compatible CAR T cell described herein. In some embodiments, at least 65% of the T cells contained in the population are an immunologically compatible CAR T cell described herein. In some embodiments, at least 70% of the T cells contained in the population are an immunologically compatible CAR T cell described herein. In some embodiments, at least 75% of the T cells contained in the population are an immunologically compatible CAR T cell described herein. In some embodiments, at least 80% of the T cells contained in the population are an immunologically compatible CAR T cell described herein.

[0347] Also provided herein, in some aspects, is a kit for making an immunologically compatible chimeric antigen receptor (CAR) T cell. In some embodiments, such a kit comprises a viral vector described herein, a viral particle described herein, or a nonviral vector described herein; and one or more reagents for transducing a T cell. In some embodiments, the kit further comprises one or more containers comprising the viral vector and the one or more reagents. In some embodiments, the kit further comprises one or more containers comprising the nonviral vector and the one or more reagents. In some embodiments, the kit further comprises a package, carrier, or container that is compartmentalized to receive the one or more containers.

[0348] Also provided herein, in some aspects, is a system comprising a T cell and the viral vector described herein or the viral particle described herein. Also provided herein, in some aspects, is a system comprising a T cell and the nonviral vector described herein.

### Methods of Killing Cells and Reducing Tumor Size

[0349] Because of the antigen specificity and the immunological compatibly of the CAR T cell(s) described herein, also provided herein is a method for killing a cell or pathogen in a subject. Such a method can include administering an effective amount of an immunologically compatible CAR T cell described here or a population of immunologically compatible CAR T cells described herein to the subject. Similarly, also provided here is a method that includes: obtaining T cells from a first subject; performing a method for producing a immunologically compatible CAR T cell or population of T cells described herein; and administering an effective amount of the immunologically compatible CAR T cells back to the first subject or to a second subject.

[0350] Because of the antigen specificity, especially for cancer antigens, and the immunological compatibly of the CAR T cell(s) described herein, also provided herein a method of reducing tumor size in a subject. Such a method, in some embodiments, comprises administering an effective amount of an CAR T cell described herein or a population of CAR T cells described herein to the subject. Similarly, in some aspects, also provided herein a method of reducing tumor size in a subject that comprises: obtaining T cells from a first subject; performing a method for producing a immunologically compatible CAR T cell or population of T cells described herein; and administering an effective amount of the immunologically compatible CAR T cells back to the first subject or a second subject.

[0351] Because of the minimal number of contacting and culturing steps of the methods described herein, the time period from obtaining T cells to administration of the generated CAR T cells is shorter than other methods known in the art. For example, in some embodiments, obtaining the T cells and administering an effective amount of the immunologically compatible CAR T cells is for a period of time that is no more than 21 days. In some embodiments, obtaining the T cells and administering an effective amount of the immunologically compatible CAR T cells is for a period of time that is no more than 20 days. In some embodiments, obtaining the T cells and administering an effective amount of the immunologically compatible CAR T cells is for a period of time that is no more than 19 days. In some embodiments, obtaining the T cells and administering an effective amount of the immunologically compatible CAR T cells is for a period of time that is no more than 18 days. In some embodiments, obtaining the T cells and administering an effective amount of the immunologically compatible CAR T cells is for a period of time that is no more than 17 days. In some embodiments, obtaining the T cells and administering an effective amount of the immunologically compatible CAR T cells is for a period of time that is no more than 16 days. In some embodiments, obtaining the T cells and administering an effective amount of the immunologically compatible CAR T cells is for a period of time that is no more than 15 days. In some embodiments, obtaining the T cells and administering an effective amount of the immunologically compatible CAR T cells is for a period of time that is no more than 14 days. In some embodiments, obtaining the T cells and administering an effective amount of the immunologically compatible CAR T cells is for a period of time that is no more than 13 days. In some embodiments, obtaining the T cells and administering an effective amount of the immunologically compatible CAR T cells is for a period of time that is no more than 12 days. In some embodiments, obtaining the T cells and administering an effective amount of the immunologically compatible CAR T cells is for a period of time that is no more than 11 days. In some embodiments, obtaining the T cells and administering an effective amount of the immunologically compatible CAR T cells is for a period of time that is no more than 10 days. In some embodiments, obtaining the T cells and administering an effective amount of the immunologically compatible CAR T cells is for a period of time that is no more than 9 days. In some embodiments, obtaining the T cells and administering an effective amount of the immunologically compatible CAR T cells is for a period of time that is no more than 8 days. In some embodiments, obtaining the T cells and administering an effective amount of the immunologically compatible CAR T cells is for a period of time that is no more than 7 days. In some embodiments, obtaining the T cells and administering an effective amount of the immunologically compatible CAR T cells is for a period of time that is no more than 6 days.

[0352] In some embodiments, the T cells obtained from the subject is a naïve T cell, whereas the CAR T cell administered to the subject is a cytotoxic T cell or a helper T cell.

### Administering Cells

[0353] In some embodiments, methods comprise administering a cell or a population of cells to a subject, wherein the cell or population of cells has been contacted with or modified by a composition disclosed herein. In some embodiments, cells are administered to a subject by intravenous or parenteral injection. In some embodiments, cells are administered directly into a tumor, lymph node or site of infection.

[0354] In some embodiments, methods comprise performing leukapheresis on a subject, wherein leukocytes are collected, enriched, or depleted ex vivo to enrich T cells. The enriched T cells can be cultured to proliferate before contacting them with a composition described herein to produce autologous CAR T-cells. Cells described herein, including CAR-T cells, can be administered at a dosage of 10⁴ to 10⁹ cells/kg body weight. In some embodiments, methods comprise administering 10⁵ to 10⁶ cells/kg body weight.

[0355] Disclosed herein, in some aspects, are methods of administering a composition described herein to a subject in need thereof. Also disclosed herein, are methods of administering a cell or a population of cells comprising a composition described herein to a subject in need thereof. The subject can be a mammal. The subject can be a non-human subject. The subject can be a human subject. Methods of administering a composition or cell to a subject can be carried out in various manners, including aerosol inhalation, injection, transfusion, and implantation. The compositions and cells described herein can be administered to a subject intravenously, subcutaneously, intradermally, intratumorally, intramuscularly, or intraperitoneally. In some embodiments, compositions comprising viruses disclosed herein are administered to a subject via intravenous, parenteral, or subcutaneous injection.

[0356] In some embodiments, methods comprise administering a composition or cell described herein to a subject having cancer. The cancer can be a solid cancer (tumor). The cancer can be a blood cell cancer, including leukemias and lymphomas. Non-limiting types of cancer that could be treated with such methods and compositions include acute lymphoblastic leukemia; acute lymphoblastic lymphoma; acute lymphocytic leukemia; acute myelogenous leukemia; acute myeloid leukemia (adult/childhood); adrenocortical carcinoma; AIDS-related cancers; AIDS-related lymphoma; anal cancer; appendix cancer; astrocytoma; atypical teratoid/rhabdoid tumor; basal-cell carcinoma; bile duct cancer, extrahepatic (cholangiocarcinoma); bladder cancer; bone osteosarcoma/malignant fibrous histiocytoma; brain cancer (adult/childhood); brain tumor, cerebellar astrocytoma (adult/childhood); brain tumor, cerebral astrocytoma/malignant glioma brain tumor; brain tumor, ependymoma; brain tumor, medulloblastoma; brain tumor, supratentorial primitive neuroectodermal tumors; brain tumor, visual pathway and hypothalamic glioma; brainstem glioma; breast cancer; bronchial adenomas/carcinoids; bronchial tumor; Burkitt lymphoma; cancer of childhood; carcinoid gastrointestinal tumor; carcinoid tumor; carcinoma of adult, unknown primary site; carcinoma of unknown primary; central nervous system embryonal tumor; central nervous system lymphoma, primary; cervical cancer; childhood adrenocortical carcinoma; childhood cancers; childhood cerebral astrocytoma; chordoma, childhood; chronic lymphocytic leukemia; chronic myelogenous leukemia; chronic myeloid leukemia; chronic myeloproliferative disorders; colon cancer; colorectal cancer; craniopharyngioma; cutaneous T-cell lymphoma; desmoplastic small round cell tumor; emphysema; endometrial cancer; ependymoblastoma; ependymoma; esophageal cancer; Ewing sarcoma in the Ewing family of tumors; extracranial germ cell tumor; extragonadal germ cell tumor; extrahepatic bile duct cancer; gallbladder cancer; gastric (stomach) cancer; gastric carcinoid; gastrointestinal carcinoid tumor; gastrointestinal stromal tumor; germ cell tumor: extracranial, extragonadal, or ovarian gestational trophoblastic tumor; gestational trophoblastic tumor, unknown primary site; glioma; glioma of the brain stem; glioma, childhood visual pathway and hypothalamic; hairy cell leukemia; head and neck cancer; heart cancer; hepatocellular (liver) cancer; Hodgkin's lymphoma; hypopharyngeal cancer; hypothalamic and visual pathway glioma; intraocular melanoma; islet cell carcinoma (endocrine pancreas); Kaposi Sarcoma; kidney cancer (renal cell cancer); Langerhans cell histiocytosis; laryngeal cancer; lip and oral cavity cancer; liposarcoma; liver cancer (primary); lung cancer, non-small cell; lung cancer, small cell; lymphoma, primary central nervous system; macroglobulinemia, Waldenstrom; male breast cancer; malignant fibrous histiocytoma of bone/osteosarcoma; medulloblastoma; medulloepithelioma; melanoma; melanoma, intraocular (eye); Merkel cell cancer; Merkel cell skin carcinoma; mesothelioma; mesothelioma, adult malignant; metastatic squamous neck cancer with occult primary; mouth cancer; multiple endocrine neoplasia syndrome; multiple myeloma/plasma cell neoplasm; mycosis fungoides, myelodysplastic syndromes; myelodysplastic/myeloproliferative diseases; myelogenous leukemia, chronic; myeloid leukemia, adult acute; myeloid leukemia, childhood acute; myeloma, multiple (cancer of the bone-marrow); myeloproliferative disorders, chronic; nasal cavity and paranasal sinus cancer; nasopharyngeal carcinoma; neuroblastoma, non-small cell lung cancer; non-Hodgkin's lymphoma; oligodendroglioma; oral cancer; oral cavity cancer; oropharyngeal cancer; osteosarcoma/malignant fibrous histiocytoma of bone; ovarian cancer; ovarian epithelial cancer (surface epithelial-stromal tumor); ovarian germ cell tumor; ovarian low malignant potential tumor; pancreatic cancer; pancreatic cancer, islet cell; papillomatosis; paranasal sinus and nasal cavity cancer; parathyroid cancer; penile cancer; pharyngeal cancer; pheochromocytoma; pineal astrocytoma; pineal germinoma; pineal parenchymal tumors of intermediate differentiation; pineoblastoma and supratentorial primitive neuroectodermal tumors; pituitary tumor; pituitary adenoma; plasma cell neoplasia/multiple myeloma; pleuropulmonary blastoma; primary central nervous system lymphoma; prostate cancer; rectal cancer; renal cell carcinoma (kidney cancer); renal pelvis and ureter, transitional cell cancer; NUT midline carcinoma; retinoblastoma; rhabdomyosarcoma, childhood; salivary gland cancer; sarcoma, Ewing family of tumors; Sézary syndrome; skin cancer (melanoma); skin cancer (non-melanoma); small cell lung cancer; small intestine cancer soft tissue sarcoma; soft tissue sarcoma; spinal cord tumor; squamous cell carcinoma; squamous neck cancer with occult primary, metastatic; stomach (gastric) cancer; supratentorial primitive neuroectodermal tumor; T-cell lymphoma, cutaneous (Mycosis Fungoides and Sézary syndrome); testicular cancer; throat cancer; thymoma; thymoma and thymic carcinoma; thyroid cancer; thyroid cancer, childhood; transitional cell cancer of the renal pelvis and ureter; urethral cancer; uterine cancer, endometrial; uterine sarcoma; vaginal cancer; vulvar cancer; and Wilms Tumor.

[0357] In some embodiments, methods comprise administering a composition or cell described herein to a subject having an infection caused by a pathogen, wherein the composition, or RNA(s) and/or protein(s) encoded by the composition, modifies a target nucleic acid of the pathogen. Non-limiting examples of pathogens are bacteria, a virus and a fungus. The target nucleic acid, in some embodiments, is a portion of a nucleic acid from a sexually transmitted infection or a contagious disease. In some embodiments, the target nucleic acid is a portion of a nucleic acid from a genomic locus, or any DNA amplicon, such as a reverse transcribed mRNA or a cDNA from a gene locus, a transcribed mRNA, or a reverse transcribed cDNA from a gene locus in at least one of: human immunodeficiency virus (HIV), human papillomavirus (HPV), chlamydia, gonorrhea, syphilis, trichomoniasis, sexually transmitted infection, malaria, Dengue fever, Ebola, chikungunya, and leishmaniasis. Pathogens include viruses, fungi, helminths, protozoa, malarial parasites, Plasmodium parasites, Toxoplasma parasites, and Schistosoma parasites. Helminths include roundworms, heartworms, and phytophagous nematodes, flukes, Acanthocephala, and tapeworms. Protozoan infections include infections from Giardia spp., Trichomonas spp., African trypanosomiasis, amoebic dysentery, babesiosis, balantidial dysentery, Chaga's disease, coccidiosis, malaria and toxoplasmosis. Examples of pathogens such as parasitic/protozoan pathogens include, but are not limited to: Plasmodium falciparum, P. vivax, Trypanosoma cruzi and Toxoplasma gondii. Fungal pathogens include, but are not limited to Cryptococcus neoformans, Histoplasma capsulatum, Coccidioides immitis, Blastomyces dermatitidis, Chlamydia trachomatis, and Candida albicans. Pathogenic viruses include but are not limited to coronavirus (e.g., SARS-CoV-2); immunodeficiency virus (e.g., HIV); influenza virus; dengue; West Nile virus; herpes virus; yellow fever virus; Hepatitis Virus C; Hepatitis Virus A; Hepatitis Virus B; papillomavirus; and the like. Pathogens include, e.g., HIV virus, Mycobacterium tuberculosis, Streptococcus agalactiae, methicillin-resistant Staphylococcus aureus, Legionella pneumophila, Streptococcus pyogenes, Escherichia coli, Neisseria gonorrhoeae, Neisseria meningitidis, Pneumococcus, Cryptococcus neoformans, Histoplasma capsulatum, Hemophilus influenzae B, Treponema pallidum, Lyme disease spirochetes, Pseudomonas aeruginosa, Mycobacterium leprae, Brucella abortus, rabies virus, influenza virus, cytomegalovirus, herpes simplex virus I, herpes simplex virus II, human serum parvo-like virus, respiratory syncytial virus (RSV), M genitalium, T. vaginalis, varicella-zoster virus, hepatitis B virus, hepatitis C virus, measles virus, adenovirus, human T-cell leukemia viruses, Epstein-Barr virus, murine leukemia virus, mumps virus, vesicular stomatitis virus, Sindbis virus, lymphocytic choriomeningitis virus, wart virus, blue tongue virus, Sendai virus, feline leukemia virus, Reovirus, polio virus, simian virus 40, mouse mammary tumor virus, dengue virus, rubella virus, West Nile virus, Plasmodium falciparum, Plasmodium vivax, Toxoplasma gondii, Trypanosoma rangeli, Trypanosoma cruzi, Trypanosoma rhodesiense, Trypanosoma brucei, Schistosoma mansoni, Schistosoma japonicum, Babesia bovis, Eimeria tenella, Onchocerca volvulus, Leishmania tropica, Mycobacterium tuberculosis, Trichinella spiralis, Theileria parva, Taenia hydatigena, Taenia ovis, Taenia saginata, Echinococcus granulosus, Mesocestoides corti, Mycoplasma arthritidis, M. hyorhinis, M. orale, M. arginini, Acholeplasma laidlawii, M. salivarium and M pneumoniae. In some embodiments, the target sequence is a portion of a gene locus of bacterium or other pathogen responsible for a disease, wherein the gene locus comprises a mutation that confers resistance to a treatment, such as antibiotic treatment.

[0358] It is understood that modifications which do not substantially affect the activity of the various embodiments described herein are also provided within the definition of the subject matter provided herein. Accordingly, the following examples are intended to illustrate but not limit the various embodiments described herein.

### Sequences and Tables

[0359] TABLE 1 provides illustrative amino acid sequences of effector proteins that are useful in the compositions, systems and methods described herein.

TABLE 1
Exemplary Amino Acid Sequence of Effector Proteins

| | SEQ | |
|---|---|---|
| | ID | |
| Name | NO | Amino Acid Sequence |
| CasM.298706 | 1 | MAKKGTNRKKMIVKVMKYELKYESGCADFNEMQNELWKLQRQTREV |
| | | MNRTIQLCYHWSYVQADYCKQHGCARRDVKPCDVYETNATSLDGYIY |
| | | QLFKDEYPNFLMANLIATLRKAHQKYDALLFDIQEGNSSIPSFKKDQPLIF |
| | | SKEAIRLPECLSDKRQITLFCFSKPYKSAHPTLDKITFAVRARSASEKSIFD |
| | | HIISGKYALGESQLVYEKKKWFFLLSYKFTPESVDVNPEKVLGVDLGVV |
| | | NALCAGSVENPHDSLFIKGTEAIEQIRRLEARKRDLQKQARYPGDGRIGH |
| | | GTKTRVSPVYQTRDAIARMQDTLNHRWSRALIDFACKKGYGTIQMEDL |
| | | SGIKALESEKPYLKHWTYFDLQSKIIYKAEEKGIRVVKVNPKCTSRRCSA |
| | | CGYISKENRKNQVEFLCVNCGYHHNADYNAAQNLSIPQIDRLIEKQLKE |
| | | QESEENEAGANPK |
| CasM.280604 | 2 | MAKGTLSKVMKYELRYLDGCGDFQNMQKELWTLQRQSREILNRTIQIA |
| | | YHWDYTDREQFKKTGQHLDIKAETGYKRLDGYIYDSLKEDVQNFASVN |
| | | VNATIQKAWAKYKSSKIDVLRGDMSLPSYKSDQPLVLHAQSMKIFSSDD |
| | | DDVLQVTLFSNAYKKACNYSNIRFIIGLHDATQRTIIKKVLSGDWGIGQS |
| | | QIVYKRPKWFLYLTYNFSPEQHEVNPDKILGVDLGESIAIYASSIGEYGSL |
| | | RIEGGEISAFAKQLEARKRSLQKQAAYCGKGRIGHGTKSRVSDVYKMED |
| | | KIANFRNTVNHRYSKMLIDYALKHMYGTIQMEDLSGIKKETGFPKFLQH |
| | | WTYYDLQQKIEAKAKEHGINFIKVDPAFTSQRCSKCGNIDSENRPSQAVF |
| | | CCKKCGYKTNADFNAS |
| CasM.281060 | 3 | MNVTKVMRYQLIYQGGGGDFESLQNQLWEFQRQTRAILNKTIQTMYLA |
| | | TANQEKFSEKALYHDLCAEYPDMISSTVNATLREATKKYRSSVREILAG |
| | | RMSLPSYKRDHPILLHNQSVALKQGNQGSYFATISVFSRKYQQGTPGVK |
| | | QPSFQLIAKDNTQRTILQRLLSGEYKLGQCQLIYIRPKWFLNVAYSFTPSE |
| | | KALDQEKVLGVDLGCVYAIYASSYGNHGIFKISGDEITSFERKQAAIQNR |
| | | AFKNDLTRIREIEERRKQKLEQARYCGEGRIGHGVKTRVAPAYQDEGKIS |
| | | RFRETINHRYSKALVDYAEKNGYGTIQMEDLSGIKSSTGFPKRLQHWTY |
| | | FDLQQKIKYKAEEQGIKVVKIKPAYTSQRCSRCGHIDPANRKSQSEFKCI |
| | | ACGFSSNADYNASQNISMRNIEKIIQGKAN |
| CasM.284933 | 4 | MAKGTITKVMKYELRYLGGFSDFHEMQKEVWQLQRQYREILNKTIQIA |
| | | LHWDYVSAQQFGESGTYLDIREETGYKTLDGYIYNCLKGAYSEMASAN |
| | | LNAAVQKAWKKYKNSKTQVLQGVMSLPSYKSDQPILIDKGNVKLSAEE |
| | | NNGRAVLTLFSRNYRDTRGLKGNVEFSVLLHDGTQKSIFRNLIDKTYAL |
| | | GQCQLVYERKKWFLLLTYSFTPAGHALDPEKILGVDLGECYALYASSCY |
| | | APGILKIEGGEIAEYALRLEKRKRSLQQQARYCGEGRIGHGTKTRVGVV |
| | | YKAEDRIASFRETINHRYSKELVDYAVSNGYGTIQMEDLSAIQKDLGFPK |
| | | RLRHWTYYDLQMKITNKAKEHGIAVVKIDPRYTSQRCSKCGHIDPANRP |
| | | RQEEFCCTACGYACNADYNASQNISIKGIEKIIQKMLSAKAD |
| CasM.287908 | 5 | MSKGMLTKVMKYTLRYVGGCGDFHEMQSILWELQKQTRAVLNKTIQIA |
| | | FEWDYRSREAFQETGEYLDVHAETGYKRLDGYIYNCLKNEYADFAGKN |
| | | LNAAIQTAWKKYNQSKRDIQTGKMSLPSYRSNQPLIIHNDNVMISQDMQ |
| | | AAPSVRFTLLSLEYKKAHDLNTNPTFEVLINDGTQRAIFEKVRSGEYKLG |
| | | QCMIQYDKKKWFLLLTYSFQPEKLTLDKNKILGVDLGETIVICASSVSER |
| | | GRFVIDGGEITRFATQIEARKRSQQHQAAYCGEGRIGHGTKTRVDAVYK |
| | | TEDRIANFRDTINHRYSRALVNYAVKHGFGTIQMEDLSGIKSSDDFPKFL |
| | | RHWTYYDLQSKIESKAKERGIAVVKVNPRFTSRRCSKCGYIDEGNRKDQ |
| | | AHFCCLSCGFRANADFNASQNLSIKGIDKIIEKEYNANSKQT |
| CasM.288518 | 6 | MGKPITKTMKYQIHYIDGCGDFHNMQKELWDLQRIVRQILNKTINESYL |
| | | WFVRSEQYYRDTGENLSVEEQTGYKTLDGHIYNLLKQEYTQKLVSNSL |
| | | NASIQAAYKKMKDSRRDVMIGTMSLPSYRSDQPIIIYNKNIKFSSHPEHGF |
| | | VVDCSLFSDAYKKSQGYEKSVKFQVSVDDNTQRSIFENILTGNYKHGQC |
| | | SIVYEKKKWFLLLTYSFVPEETKLDPDKILGVDVGVVYALYASSKGNHG |
| | | TFKIKGDEAITFIQRVEARKHSRQLQGTYCGDGRIGHGTKTRVQPVYNER |
| | | ALISNFQDTINHRYSKALIDYAKKNGYGTIQMEDLSGIKEVQQYPKYLQ |
| | | HWTYYDLQLKIQYKAKEAGIGFVKVTPKYTSQRCSHCGNIDEANRPKQ |
| | | DVFRCTVCGYERNADYNASQNLSIKGIDRIIDDQLKQMNKANPKKTENA |
| CasM.293891 | 7 | MSGGAITKVMKYDLTYKDGYGNFKDMQEAVWKLIRDTRTILNETIKIA |
| | | YHWDYLNEKSKRETGEHLDLLEETGYKRLDGYIYDDLKDRFPDFASSNL |
| | | NAAIQTAWKKYKQSQKDVYIGKMTLPSYKSDQPLPINKQSIKIYDEERE |
| | | HIVELNLFSTKHKKEHGLASNVRFRINLHDNTQHAIYERVLSGEYTLGQC |
| | | QLLYDRPKWFFILTYSFKPAQNKLDPDKILGVDMGETCALYASTFGEQG |
| | | SFVINGGEVSEYAKREEARKRSLQKQAAVCGEGRIGHGTKTRVSSVYKE |
| | | QERISNFRDTINHRYSKALIEYAVKNGCGTIQMEDLSGIRQSTDFPKFLRH |
| | | WTYYDLQQKIKTKAKETGIAVSMIDPRYTSQRCSRCGHIDKANRKDQA |
| | | HFHCLKCGYSCNADFNASQNISIRGIDKIIQKELGAKAKQTD |
| CasM.294270 | 8 | MKEIAKVMKYQLIYLDGGGDFYELQQTLWDLQRQTREILNKTIQSMYL |
| | | ATATNTAFEENALYHRFGAEYPMMAALNVNATLRTAKKRYTSTIKETL |
| | | RGTMSLPSYKRDQPILLHNQTIHLALEDGQYSALFSVYSEKFQKAHEGV |
| | | ARPRFALMARDGTQRAILDRLLDGSYRLGQSQMTYEQKKWFLSLTYKF |
| | | VPEVRELDKSKILGVDLGCVYAIYASSMQQKGIFKISGDEITEFEKRQAA |
| | | MQNREPVSTLERVEQLEQRRWQKQQQARYCGEGRVGHGTGTRVAPAY |
| | | RDADKIARFRDTINHRYSKALVEYAEKNGFGTIQMEDLSGIKEDTGFPKR |
| | | LRHWTYFDLQTKIQYKAAERGITVVKIDPQYTSQRCSRCGYIDKANRAS |
| | | QEKFLCQSCGFEANADYNASQNISVEKIDKLIAKDKKKLART |
| CasM.294491 | 9 | MGQVTKVMRYQLIYQDGGGDFYTVQQELWELQRQTREILNKTIQTMYL |
| | | ADANKEKFDNAAERTLNRRFCVDHPDMYTKTVTATLRKAKAKYNASQ |
| | | KEILAGRMSLPSYKRDQPILLNPQGFKIEEESDSFFAAIAVFSDKYKNKHP |
| | | DVDVKRLRFRLVVKDGTQRAIIRRVISGEYKLGRSQLLYSKKKWFLNVT |
| | | YSFEPAEKKVDPDKILGVDLGCVYAIYASSFGSPGVFKISGDEVSSFERK |
| | | QAAIQNRSPKSTLERVEKIEERHKQKQQQARYCGEGRIGHGTKTRIAPVY |
| | | QDEDKIARFRDTVNHRYSKALIDYAEKNGYGTIQMEDLSGIKSATGFPK |
| | | RLKHWTYYDLQTKIEYKAEERGIKVVKIDPRYTSQRCSRCGYIDSGNRK |
| | | SQAEFCCMACGFSCNADYNASQNISIGGIAKIIADKRKEADAK |
| CasM.295047 | 10 | YLDIREETGYKTLDGYIYNCLKGAYSEMASANLNAAVQKAWKKYKNS |
| | | KTQVLQGVMSLPSYKSDQPILIDKGNVKLSAEENNGRAVLTLFSRNYRD |
| | | TRGLKGNVEFSVLLHDGTQKSIFRNLIDKTYALGQCQLVYERKKWFLLL |
| | | TYSFTPAGHALDPEKILGVDLGECYALYASSCYAPGILKIEGGEIAEYALR |
| | | LEKRKRSLQQQARYCGEGRIGHGTKTRVGVVYKAEDRIASFRETINHRY |
| | | SKELVDYAVSNGYGTIQMEDLSAIQKDLGFPKRLRHWTYYDLQMKITN |
| | | KAKEHGIAVVKIDPRYTSQRCSKCGHIDPANRPRQEEFCCTACGYACNA |
| | | DYNASQNISIKGIEKIIQKMLSAKAD |
| CasM.299588 | 11 | MAEKTIVKVMKFELRYIDGAGEFSEMQKHLWELQKQTREVLNKTIQMG |
| | | YALECKRFAHHDKTGQWLDDKELTGSKYKAVADYINAELKEDYNIFYS |
| | | DCRNSTVRKAYKKFKDAKNKIFSGEMSLPSYRSNQPIIIHNRNVIIRGNAE |
| | | SALVGLKVFSDGFKALHGFPAAVNFKLCVKDGTQRAIIENVISEIYKISES |
| | | QLIYDNKKWFLILAYRFTQKKNDLNPDKILGVDLGVKFAVYASSIGEYG |
| | | SFRIKGGEVTEFIKRLEKRKKSLQNQATVCGDGRIGHGTKTRVADVYKA |
| | | RDKISNFQDTINHRYSRAIVDYARKNGYGTIQLEKLDNSIEKKGDYSPVL |
| | | VHWTYYDLRTKMEYKAAEYGIKVIAVEPKYTSQRCSKCGYISSENRKTQ |
| | | ESFECIKCGYKCNADFNASQNLSVRDIDRIIDEYLGANPELT |
| CasM.277328 | 12 | VVNVAKGALSKVMKFELSYLDGCGDFQNMQKELWTLQRQTREILNRTI |
| | | QIAYHWDYTDREHFKKTGQHLDVKSETGYKRLDGYIYDELKETVQNFA |
| | | SVNVNATIQKAWAKYKSSKTDVLRGDMSLPSYKSDQPLVLHAQSIKLSE |
| | | DKDGPVLQVTLFSNAHKKACDYSNVRFAFRLHDATQRAIFKNVLSGEY |
| | | GLGQSQIVYKRPKWFLYLTYNFSPEQHGLDPDKILGVDLGESIALYASSL |
| | | GDYGSLRIEGGEVTAFAKQLEARKRSLQKQAAHCGEGRVGHGTRARVS |
| | | DVYKAEDKIANFRNTVNHRYSKKLIEYAIQNRYGTIQMEDLSGIKQDTG |
| | | FPKFLQHWTYYDLQQKIEAKAKENGINFIKVDPSYTSQRCSKCGNIDSDN |
| | | RPSQAVFCCTKCGFRANADFNASQNLSIPEIDKIIKKERGANTK |
| CasM.297894 | 13 | MAKKGTNRKKMIVKVMKYELKYEKGCADFNEMQNELWKLQRQTREV |
| | | MNRTVQLCYHWNYVQADYCKQHGCAHRDVKPCDVYETNATSLDGYI |
| | | YQLFKDEYPNFLMANLIATLRKAHQKYDALLPDIQEGNSSIPSFKKDQPL |
| | | IFSKEAIHLPECLSDKRQITLFCFSKPYKSAHPTLDKITFAVRAHSASEKSIF |
| | | DNIINGKYALGTSQLVYEKKKWFFLLSYKFTPESVDVNPEKVLGVDLGV |
| | | VNALCAGSVENPHDSLFIKGTEAIEQIRRLEARKRDLQKQARYPGDGRIG |
| | | HGTKTRVSPVYQTRDAIARMQDTLNHRWSRALIDFACKKGYGTIQMED |
| | | LSGIKAMESEKPYLKHWTYFDLQSKIIYKAEEKGIRVVKVNPKCTSRRCS |
| | | ACGYISKENRKNQAEFLCVNCGYHHNADYNAAQNLSIPQIDRLIEKQLK |
| | | EQESEESEAGANPK |
| CasM.291449 | 14 | MTERHDNESSKIKAEVSLLNSSVPDFEKKRHVKVLKLHILKPAGDMKW |
| | | DELGALLRDARYRVFRLANLAISEAYLDFHKWRSGGNEQPKLKISQLNR |
| | | NLRSMLEDEVTGKQTKMIKSDRYSKSGALPDSIVSPLSMYKLGGLTSKS |
| | | KWSEVLRGKSSLPTFKLNMAIPVRCDKPGDRRIERTKNGDAEVELRICLQ |
| | | PYPRVIIATGRNSLGDGQRAILDRLLDNTKYSEQGYRQRCFEIKEDQRSG |
| | | KWHLFVTYDFPAIEPAKNLSRERIVGVDLGAACPLYAAINTGHARLGWK |
| | | HFSPLAARVRALQNQTIRRRRQILRGGKVSLSEDSARSGHGRKRKLKPIS |
| | | KLEGKIDRAYTTLNHQLSATVIKFAKDNGAGVVQMEDLKGLRETLTGTF |
| | | LGERWRYEELQRFIRYKADEAGIEIRLVNPQYTSRRCSECGHIHKDFTRE |
| | | FRDKSREGNKSVRFLCPDCGFTADPDYNAARNLASLDIAAIIERQLEIQG |
| | | LRKHDP |
| CasM.297599 | 15 | MKEKSKTLVKVARLRILKPAGDMKWSELGEMLRTVRYRVFRLANLAVS |
| | | EAYLGFHMYRTNRATEFKAETIGKLSRRLREMLIEEGVDEKDLSRYSQT |
| | | GAVPDTVAGALGQYKIRGITSPTKWRQVVRGQAALPTFRNDMAIPIRCD |
| | | KQYQRRLEKTEAGEIEVELMICRKPYPRIVLGTADLGPGQRAILERLLQN |
| | | TDNSADGYRQRLFEAKQDTQTKKWWLYVTYDFPRLKEGKLNQEIVVG |
| | | VDLGFSIPLYVALNIGHARLGRRHFQALGNRIRSLQRQVLARRRSIQRGG |
| | | RVNISHSTARSGHGRKRKLLPTEKLRGRIEKSYSTLNHQLSASVIDFAKN |
| | | HHAGTIQIEDLANLKEELAGTFIGARWRYHQLQQFLKYKAEEAGITLNQ |
| | | VNPRYTSRRCSECGFINIDFDRAFRDAGRTEGRVTKFLCPECGYEADPDY |
| | | NAARNISILDIDKLIRVQCKKQGLTYDAH |
| CasM.286588 | 16 | MPERPKTVNKVIWFQIHKPAGDMTWKELGNLLREARYRVFRLANLAVS |
| | | EKYLSFHMWRTGQEYKSETIGKLNRRLREMLIEEGVEEESQKRFSATGA |
| | | LPDTVVSTLAKGKLAAITSKSKWKDVVNGKTSLPTFKLNMAIPVRCDKA |
| | | EQRRLRRTESGDVELELMICKQPYPRVVLKTGKLKSGQRAILDRLVENN |
| | | DNSKEGYSQRVFEIKQVENNDGSKEWRLYISYTFPKKAVEANADVAVG |
| | | VDIGFSVPLVAAVNNGLERLGYNDFRALNERIRSLQRQVLVRRRSMQSG |
| | | GRDYVSTPTARSGHGRKRKLLPIQTLRKRWDNAYTTLNHQLSHAVVSF |
| | | AENHGAATIQIENVKSLKDELRGTFLGQRWRYFELQQFLKYKADEVGIE |
| | | LREVNARYTSRRCSECGYINMAFTRQARDKGRVDGKPMEFVCPECGYK |
| | | AHPDYNAARNIAMLDIEQKMQVQCKQQGITYADDSEVL |
| CasM.286910 | 17 | MTWPELGNMLRTVRYRVFRLANLAVSEAYLGFHMFRTKRAEEFKAET |
| | | MGKLSRRLREMLIEEGVDEKDLSRYSQTGAVPDTVAGALSQYKIRGITSP |
| | | TKWRQIVRGQVALPTFRNTMSIPVRCDKLYQRRLEQGDSGEVEVELMIC |
| | | RNPYPRVVLGTGDLNPGQQAILERLLQNTDNSADGYRQRLFEIKEDVQT |
| | | RKWWLYVTYDFPKTTGKLNPEIVVGVDLGFSIPLYVALNSGHARLGYL |
| | | HFKALGERIKSLQKQVMARRRAIQRGGRVSISHSTARTGHGVKRKLQPT |
| | | EKLRGRIEKSYSTLNHQLSASVIDFAKNHHAGVIQIEDLSGLKEQLTGTFI |
| | | GARWRYHQLQQFLKYKAEEAGITLKQINPRYTSRRCSECGFINMDFDRA |
| | | FRDAGRTYGKVTKFLCPECGYEADPDYNAARNIATLDIEKLIRVQCEKH |
| | | GLKFDAH |
| CasM.292335 | 18 | VGKEGKRNVKVMKIRILKPCDGMTWNELGQLLRDARYRVFRLANLTVS |
| | | EAYLNFHLWRTGRSQEFKKQTIGQLNRQLRNILQQEKYDDEKLNRYSKT |
| | | GALPDTVCSALWQYKLMAVMKKSKWSEVIRGKSSLPTFRNDMAIPVRC |
| | | DKPEQKRIEKTEQGQVEAALQVCVQPYPRVILGTHTLGDGQDAILKRLL |
| | | DNQNQAIGGYRQRSFEIKYDEQKRWWLFITYDFPATEVATDKTIAVGVD |
| | | LGVSVPLYAAVNNGPARLGRREFGGLGRRIRDLRNQTDARRRSIQRSGR |
| | | EGQSDDTARAGHGRKRKLLPIHILEGRLDKAYTTLNHQMSAAVIKFAAE |
| | | QGAGIIQIENLAGLQDELRGTFIGGRWRYRQLQDFLKYKTQEMGIELRQ |
| | | VNPKYTSRRCSKCGFIHKDFDRDYRNRHSENGKPAQFVCPNPDCKYESD |
| | | PDYNAARNLATLDIEEQIRVQCQKQGLEYDSKKDKNAL |
| CasM.293576 | 19 | MKEKSKTLVKVARLRILKPAGDMTWSELGEMLRTVRYRVFRLANLAVS |
| | | EAYLGFHMFRTQRAAEFKAETMGKLSRRLREMLIEEGVDEKELNCYSLT |
| | | GAVPDTVAGALHQYKIRGITSPTKWRQVVRGQAALPTFRNDMSIPIRCD |
| | | KPYQRRLEKTEAGEVEVELMICRKPYPRIVLGTADVGPGQEVILERLLQN |
| | | KDNSSDGYRQRLFEAKQDRQTGKWWLYVTYDFPRPEEGELNPEIVVGV |
| | | DLGFSVPLYVAINNGYARLGRRHFQALGNRIRSLQRQVLARRRSIQRGG |
| | | RVNISHDTARSGHGIKRKLLPTEKLRGRIEKSYSTLNHQLSASVIDFTKNH |
| | | HAGTIQIEDLANLKEVLAGTFIGARWRYHQLQQFLKYKADEAGITLKEV |
| | | NPRYTSRRCSECGFIHKDFDRAFRDSGRTDGKVARFVCPECGYGPVDPD |
| | | YNAAKNISTLDIEKHIRVQCKKQGLEYEVH |
| CasM.294537 | 20 | MKEKAKTLVKVARLRILKPAGDMTWPELGNMLRTVRYRVFRLANLAV |
| | | SEAYLGFHMFRTKRAEEFKAETMGKLSRRLREMLIEEGVDEKDLSRYSQ |
| | | TGAVPDTVAGALSQYKIRGITSPTKWRQIVRGQVALPTFRNTMSIPVRCD |
| | | KLYQRRLEQGDSGEVEVELMICRNPYPRVVLGTGDLNPGQQAILERLLQ |
| | | NTDNSADGYRQRLFEIKEDVQTRKWWLYVTYDFPKTTGKLNPEIVVGV |
| | | DLGFSIPLYVALNSGHARLGYLHFKALGERIKSLQKQVMARRRAIQRGG |
| | | RVSISHSTARTGHGVKRKLQPTEKLRGRIEKSYSTLNHQLSASVIDFAKN |
| | | HHAGVIQIEDLSGLKEQLTGTFIGARWRYHQLQQFLKYKAEEAGITLKQI |
| | | NPRYTSRRCSECGFINMDFDRAFRDAGRTYGKVTKFLCPECGYEADPDY |
| | | NAARNIATLDIEKLIRVQCEKHGLKFDAH |
| CasM.298538 | 21 | MAKKAKTMFKVTNFRILKPAGDMTWKELGQLLRDARYRTFRMANLAL |
| | | SEAYLNFYLLKKGDLKEYKNVKIGQIAKRLRDMLIEEGVDEEVQNRFSP |
| | | KVALPAYVYSALDQFKLRGLTSKSNWKKVLRGQASLPTFRLNMSVPIRC |
| | | DKPEHRRLEKTENGNVEVDLMICRKPYPRVVLETLKLDGSSKAILDRLL |
| | | ENEDNSPGNYRQRCFEVKQNPRSNDWWLYVTYEMPVDKDKKLDPKVI |
| | | VGVDLGFSVPLYVAINNGHARLGRRHFQALGKRIHNLQNQVLARRRSIQ |
| | | RGGQVNLSHSTSRSGHGRKRKLQPTEKLQQKINSAYSTLNHQLSSSVIDF |
| | | ANNHKAGTIQIEDLETLKEQLTGTYIGRQWRYYQLQQFIEYKAKENSITV |
| | | KKINPKYTSRRCSMCGHIHADFDRTFRDRSSNKGFVTKFICPECNFEADP |
| | | DYNAAKNISTLDIENKIKLQCKKQKIDY |
| CasM.19924 | 22 | MPKITRKIELLFDRSGLSEEECKEKWRFIYQINDNLYRVANRLVNQLYLA |
| | | DEIDDILRLSDQEYIALRKKLANKKLDEATRISLEEQMSQVMKRVNERRS |
| | | AILQRPQQSFAYSVVTDSDTEGLTAKILDVLKQDVLSHYKADTKEVLKG |
| | | EKSISNYKKGMPIPFAFNDSLRLYKEDGFFYLKWYNGIRFLLNFGRDASN |
| | | NQLIVERCLGISKDEISYKACSSSIQIKKKGNHSKIFLLLVVDVPVEQYAQ |
| | | KPNMVVGVDLGLNVPIYAASNSTLERKAIGSREAFLNQRGAFQRRFRAL |
| | | QRLQTTKGGRGRLHKLEPLERVREAERNWVRTQNHLFSREVINFAIDVG |
| | | ASTIQMEKLANFGRDAQGEVREDKKYVLRNWSYFELQNLIEYKAKRAG |
| | | IKVKYINPAFTSQTCSECGQLGERDSIHFKCTNPDCPNCGKDIHADYNGA |
| | | RNIAKSKDYIK |
| CasM.19952 | 23 | MPTITRKIELTLLTEGLSEEQRKEQWGLLYHINDNLYKAANNISSKLYLD |
| | | DHVSSMVRMKHAEYLSLLKELARAEKQKTPDADAIAELRKKVAAAEKE |
| | | MTDQEHAICKYATEMSTQSLSYRFATELETNIFAKILDCLKQGVFATFNS |
| | | DARDVKRGERAIRNYKKGMPIPFAWDKSLRIEKDNKDFYLRWYNGLRF |
| | | LFNFGKDRSNNRLIVERCLKMDADYDGEYKLCNSSIQIAKREGKTKLFL |
| | | LLVVKIPQEHVELNKKVVVGVDLGINVPAYVATNITEERKAIGDREHFL |
| | | NSRMAFQRRYKSLQRLRGTAGGKGRAKKLEPLERLRKAEHNWVHTQN |
| | | HLFSREVVDFAVKSHAATIHMEDLSGFGKDNDGNADERKEFVLRNWSY |
| | | YELQNMIAYKAAKYGIKVEKIHPAYTSKTCSWCGQLGFREGVTFICENP |
| | | ECKQCGEKVHADYNAARNIANSKDIIKKNE |
| CasM.274559 | 24 | MPTITRKIELTLCTDGLSEEQRKEQWGLLYHINDNLYKAANNISSKLYLD |
| | | DHVSSMVRMKHAEYLSLLKELARAEKQKTPDADAIAELKKKVAATEKE |
| | | MTDQEHAICKYATEMSTQSLSYRFSTEFETKIFAKILDCLKQGVFATFNS |
| | | DAKDVKRGERAIRNYKKGMPIPFAWTDSLRIKKDNKDFYLLWYNGLRF |
| | | LFNFGKDRSNNRLIVERCLKMDADYDGEYKLCNSSIQIAKREGKVKLFL |
| | | LLVVSIPKEHVELNKKVVVSVDLGINVPAYVATNITEERKAIGDREHFLN |
| | | SRMAFQRRYKSLQRLKGTTGGKGRTKKLEPLERLRKAEHNWVHTQNH |
| | | LFSREVVDFAVKTHAATIHMEDLSGFGKDNDGNADERKEFVLRNWSYY |
| | | ELQNMISYKAAKYGIKVEKIRPAYTSKTCSWCGQHGFREGVTFICENPA |
| | | CKQCGEKVHADYNAARNIANSKEIIKKNE |
| CasM.286251 | 25 | MPTITRKIELTLCTEGLSDQERKDQWNLLYHINDNLYRAANNISSKLYLD |
| | | DHVGSMVRLKHAEYLSLLRALEKAKKQKAPDEEVIAELSQQVATAEQE |
| | | MDEQAKAICQYATEMSTQTLSYRFATELETNIFGQILTCLRQGVFSTFNS |
| | | DARDVKRGERSIRTYKKGMPIPFPWNDSLRIGFEDGEFYLRWYNGLRFR |
| | | FDFGKDRSNNCLIVQRCMKMDKDYEGDYKLCNSSIQMVKREGKPKFFL |
| | | LLVVNIPQERVELNKNIVVGVDLGINAPAYVATNTTPERKQIGDREHFLN |
| | | ERMAFQRRFKSLQRLKGTTGGRGRAKKLEPLERLRKAEQNWVHTQNHL |
| | | FSREVIDFAVKARAATIHMEDLSGFGKDNDGNADERKEFVLRNWSYYE |
| | | LQNMITYKAAKYGIKVEKIRPAYTSKTCSWCGHQGFREGITFICENPECK |
| | | KFGEKEHADYNAARNIANSKEIIKNNEE |
| CasM.288480 | 26 | MPTITRKIELTLLTEGLSEEQRKEQWGLLYHINDNLYKAANNISSKLYLD |
| | | DHVSTMVRMKHAEYLSLLRELARAEKQKKPDVDAIAELREKVTAAEKE |
| | | MSDQERAICTYATEMSTQSLSYRFATEIETNIFAKILDCLKQGVFATFNSD |
| | | ARDVKRGERAIRNYKKGMPIPFAWDKSLRIEKDNKDFYLRWYNGLRFL |
| | | FNFGKDRSNNRLIVERCLKMDADYDGEYKLCNSSIQIVKREGKVKLFLL |
| | | LVVSIPQEHVELNKKIVVGVDLGINVPAYVATNITEERKAIGDREHFLNS |
| | | RMAFQRRYKSLQRLKGTAGGKGRTKKLEPLERLRKAEHNWVHTQNHL |
| | | FSREVVDFAVKSHAATIHMEDLSGFGKDNDGNADERKEFVLRNWSYYE |
| | | LQNMIAYKAAKYGIKVERIRPAYTSKTCSWCGQLGFREGVTFICENPEC |
| | | KQCGEKVHADYNAARNIANSKDIIKKNE |
| CasM.288668 | 27 | MPTMTRKIELKLCTEGLSDEERKAQLGLLYHINDNLYKAANNISSKLYL |
| | | DDHVSSMVRLKHAEYLSLLNEFEKAKKKGDEEQIVELSLRVAAAEKELT |
| | | DQELAICKYATEMSTDTLAYRFANEIEINVFGQILACLKQGIHSTFKKDA |
| | | ADVKRGERAIRNFKKGMPIPFPWSKSIRIENEGSDFYLRWYNGLRFRFDF |
| | | GKDRSNNRLIVSRCLNLDPDFEDEYKLSNSSLQMVKRDGRPKLFLLLVV |
| | | NIPQENVELNKKIVVGVDLGINSPAYVATNITMERQRIGSRDTFLNARMA |
| | | IQRRFQSLQKLQNTAGGRGRKKKLEPLERLKETERNWVRTQNHLFSRDV |
| | | VQFAVKTRAATIHMEDLSGFGKDDDGNADEKKEFVLRNWSYYELQTMI |
| | | KYKAAKYGIKVEKIRPAYTSRTCSWCGHEGDRKGETFICENPECEKYGK |
| | | KENADYNAARNIANSTDIIK |
| CasM.289206 | 28 | MPTITRKIELTLCTEGLSDEQRKEQWGLLYHINDNLYKAANNISSKLYLD |
| | | EHVSSMVRMKHAEYLSLLKELARAEKQQTPDEGLIAELSRKLSAAEKE |
| | | MADQELAICKYATEMSTQTLSYNFAKEIETNIFGQILTCLRQGVYATFNS |
| | | DAKDVKRGERAIRNYKKGMPIPFPWNNSLKIESDSGEFYLRWYNGLRFL |
| | | LTFGKDRSNNRMIVNRCMKMDEDFEGEYKLCNSSIQLAKRDGKPKLFLL |
| | | LVVNIPQEHVKLNKKIVVGVDLGVNVPAYVATNITEERKAIGDREHFLN |
| | | TRMAFQRRYKSLQRLKGTAGGKGRTKKLEPLERLRDAERNWVHTQNH |
| | | LFSREVVNFAVQARAATIHMEDLSGFGKDKDGNADEKKEFVLRNWSFY |
| | | ELQNMIAYKSAKYGIKVVKIRPAYTSKTCSWCGQQGDRKSTTFICENPK |
| | | CKHYGESIHADYNAARNIANSNDIVKENE |
| CasM.290598 | 29 | MPKITRKIEMTLCTEGLSDEQRKEQWGLLYHINDNLYKAANNISTKLYL |
| | | DEHVSSMVRMKHADYLSLLKELAKAEKKSPDEDLIAELREKLAAAEQE |
| | | MTDQELAICKYATEMSTQTLAYKFATEIEINVFGQILACLKQAAQSNFKS |
| | | DAKDVKRGERAIRNYKKGMPIPFPWNDNIRIDADGDEFYLRWYNGLRF |
| | | HLTFGKDKSNNRMIVKRCLKMDKDFEGEYKLCNSSIQMVKRDGKPKLF |
| | | LLLVVNIPQEHVELNKNVVVGVDLGVNVPAYVATNITEERKAIGEREHF |
| | | LNTRMQIQRRYKSLQRLKATAGGKGRTKKLEPLERLRKAEHNWVHTQN |
| | | HLFSREVVNFAVQTHAATIHMEDLSGFGKDDDGNADEQKEFVLRNWSF |
| | | YELQNMIAYKAAKYGIKVEKVKPAYTSKTCSWCGQLGFRQGVTFICENP |
| | | ACKQCGEKVHADYNAARNIANSKDIIKKNE |
| CasM.290816 | 30 | MPTITRKIELHLCTDGLTDEQQKAQRLLLYHINDNLYKAANNVSSKLYL |
| | | DEHVSSMVRLKHDEYLSLSRELARAEKKHDDELTTELRGKLAAAEREM |
| | | TDQELAICKYATEMSTQSLSYRLVTELETKIFAKILDCLKQGVYATFNSD |
| | | ARDVKRGERAIRNYKKGMPIPFAWNDSVRIEYDEKEKDFYLRWYNDIRF |
| | | KFHFGRDRSNNRLIVSRCLKLDKDYEGDYQLCNSSIQIVKRDGSTKFFLL |
| | | LVVKIPQEHVELNKRIVVGVDLGINYPAYVATNCTEERMYIGDREHFLN |
| | | TRMQFQRRYKSLQKLKGTAGGKGRSKKLEPLERLRNAERNWVHTQNH |
| | | LFSLKVVNFAVQTHAATIHLEDLSGFGKDDDGNADERKEFVLRNWSYY |
| | | ELQSMIEYKAKKYGIKVEKIRPAYTSQTCSWCGQRGFRQGVTFICENPEC |
| | | KKCGEKENADYNAARNIANSKDVIKDKNE |
| CasM.295071 | 31 | TPFVLYFQNYSLSLRQHITLYSMPTITRKIELTLCTEGLSDQERKDQWNLL |
| | | YHINDNLYRAANNISSKLYLDDHVGSMVRLKHAEYLSLLRAMEKAKKQ |
| | | KAPDEEVIAELSQQVAAAEQEMDEQAKAICQYATEMSTQTLSYRFATEL |
| | | ETNIFGQILTCLRQGVFSTFNSDARDVKRGERSIRTYKKGMPIPFPWNDSL |
| | | RIGFEDGEFYLRWYNGLRFRFDFGKDRSNNRLIVQRCMKMDKDYEGDY |
| | | KLCNSSIQMVKREGKPKFFLLLVVNIPQERVELNKNIVVGVDLGINAPAY |
| | | VATNTTPERKQIGDREHFLNERMAFQRRFKSLQRLKGTTGGRGRAKKLE |
| | | PLERLRKAEQNWVHTQNHLFSREVIDFAVKARAATIHMEDLSGFGKDR |
| | | DGNADERKEFVLRNWSYYELQNMITYKAAKYGIKVEKIRPAYTSKTCS |
| | | WCGHQGFREGITFICENPECKKFGEKEHADYNAARNIANSKEIIKNNEE |
| CasM.295231 | 32 | MPTITRKIELHLCTEELSDEQQKAQRLLLYHINDNLYKAANNVSSKLYLD |
| | | EHVSSMVRLKHDEYLSLLRELARAEKKADDELATQLREKLVAAEREMT |
| | | DQELAICKYATEMSTQSLSYRFVTELETKIFAKILDCLKQGVYATFNSDS |
| | | RDVKRGERAIRNYKKGMPIPFAWDKSVRIEYEEKEKDFFLRWYNDIRFK |
| | | FHFGRDRSNNRLIVSRCMKLDKDYEGDYQLCNSSIQIVKRDGSTKYFLLL |
| | | VVKIPQEHVELNKKIVVGVDLGINYPAFAATNCTEERMSIGDREHFLNTR |
| | | MQFQRRFKSLQRLKGTTGGKGRNKKLEPLERLRKAEHNWVHTQNHLFS |
| | | LKVVNFAVQAHAATIHLEDLSGFGKDDDGNADERKEFVLRNWSYYELQ |
| | | NMIKYKAKKFGIQVEKIRPAYTSQTCSWCGQRGFRQGITFICENPECKKC |
| | | GEKENADYNAARNIANSKDIIKDKDE |
| CasM.292139 | 33 | MPIITRKIELHISKEGLSAEDYKAQWQYLRQINDNLYMAANRVSSHCFLN |
| | | DEYKYRLCLQIPDYIDIEKQLKDSKRARLSKEELGQLKKRKKELENTVK |
| | | GRFQDEFEKNSLYTIISNEFGEIIPGQILTCLRQCVQSKYNRAKEELEKGE |
| | | RAISTYKKGMPIPFPINKSIRLQKQGEDFVLKWYNKIVFKLHFGRDRSNN |
| | | RVIVERLIQSALNDKQKGEDYVMNNSSIQLVEKDKMTKIFLLLSMDIPTQ |
| | | KRKLDSELVLGVDLGLNFPLYYATNQSANIHDHIGDKDIFLKERMVFQR |
| | | RFKELQRLQCTQGGRGRKKKLEPLEKLRDKERNWVRTKNHIFSREVIKV |
| | | ALHLGAGTIHLENLHNFGKDGNGELKNSKKFVFRNWSYFELQSMIEYK |
| | | AKMEGITVKYVNPAYTSQTCSVCGMIGERKEQAVFRCMNSSCLEYGKE |
| | | VNADFNAARNIAKAKM |
| CasM.279423 | 34 | MPTITRKIELTLCTDGLSDDLRKDQWQLLYHINDNLYKAANNISSKLYL |
| | | DEHVASMVRLKHAEYLGLIKELAKARKRADDEAVRDLCSKLAVAEQE |
| | | MNEQAKAICDYATEMSTQTLSYNFAKEIETNIFGQILTCLRQGVLLNFNS |
| | | DARDVKRGERAIRNYKKGMPIPFPWNDTIKIVSEGDEFYLRWFSGLRFH |
| | | LNFGKDRSNNRMIVRRCLKMEQDFDEEYKISNSSIQVAKRDGKQKLFLL |
| | | LVVQIPQEQVVLNKKIVVGVDLGVNVPAYVATNITEERKAIGDREHFLN |
| | | TRMQFQRRYKSLQRLKTTEGGRGRAKKLEPLERLRKAEHNWVHTQNH |
| | | LFSREVVNFALQTQAATINMEDLSGFGKDNDGNADECKEFVLRNWSYY |
| | | ELQNMIVYKASKYGIRVQKIRPAYTSKTCSWCGHMGFREGVTFICENPD |
| | | CKQFGEKVHADYNAARNIANSKEIIKNDE |
| CasM.20054 | 35 | MSKTVTKTVKIALICEHTNKYGEKVDYKDINKLLWKLQKQTRELKNKTI |
| | | QLCWEYNNFSCDYYKEHHEYPNMEDILKYKRINGFVENKLKTVNDLYS |
| | | SNCSTTILSTCNEFQNYRSEFLKGTRSINSYKSDQPLDLHKGAIKLEHDGK |
| | | DFYVSLKLLKRSAFNAMEFKGSDIRFKLNVKDKDKSTLKILESCYDKIYS |
| | | ISASKMTYDRKAGKWFLLLAYSFTPAKTENLDPEKILGVDLGIKIPICASV |
| | | YGDLDRLTIEGGKIEEFRRRVEARKRSLQKQGKQCGDGRIGHGTKKRIK |
| | | PITDIGDKIARFRDTENHIYSRYLIEYAVKKGCGTIQMEKLEGITREKDIFL |
| | | KNWTYFDLQKKIEYKAKEKGIKVVYIEPAYTSKRCSSCGFIDTDNRLDQ |
| | | AHFKCLKCGFNENADYNASQNIGIKNIDKIIKEEHKSASDKLTSE |
| CasM.282673 | 36 | VIILTKVVKLYLISEQINKEGQKIDYQRINSILWDLQKQTRDIKNRTVQLC |
| | | WEWMNFSSDYCKTQEEYPKERDILGYTLEGYVYDYFKTGYDLYTGNIS |
| | | TSSREVCSSFKNVKKEILKGERSILSYKANQPLDLHKKAISLEYDNFNFFV |
| | | KLKLLNRTGKKKYDITEDINFKIQVNDKSTRTILERCYDKEYKISGSKLIY |
| | | EKKKKLWRLNLCYSFENSQVETLEKDKILGIDLGIVYPLMASIYGEYDRF |
| | | SIKGGEIEEFRRRTEARKRSILQQTKYCGDGRIGHGRNKRTQPAYKINDKI |
| | | ARFRDTANHKYSRALIEYAVKKNCGIIQMENLTGISDNTDCFLKDWSYY |
| | | DLQTKIENKAKEMGIKVVYIKAQYTSQRCSRCGYIDVNNRIRQALFKCQ |
| | | NCGYETNADYNASQNIGMYDIENIIEETLKIQSANVKQS |
| CasM.282952 | 37 | MTKVTKVYLISEQIDKDGNKIDFKKISELLWNLQMQTRDIKNKCVQLCW |
| | | EWLNFSSDYYKKSEEYPKEKDTLGYTLSGFVYDRIKNGSDLYSSNLSTSS |
| | | RDTCTAFSNYKKEMLKGERSVLSFKANQPLDIHNKAIKLSYENGNFFVA |
| | | LKMLNRAGKEKYGIKDDLRFRMQVRDKSVRTILERLMNDEYKVSASKL |
| | | MYDKKKKLWKLNLCYSFDNHVISTLDTEKIMGVDLGVVYPIMASVNGD |
| | | YARFSIKGGEIEAFRSRVEARRRSLLNQSRYCGDGRIGHGRKKRTEPATQ |
| | | IADKIARFRDTTNHKYSRALIDYAIKNGCGTIQMEKLTGITSSAEHFLKE |
| | | WSYFDLQTKIESKAKEAGIKVVYINPKFTSQRCNKCGYIHTDNRPVQARF |
| | | CCQKCGYEENADYNASQNIGTKHIDVIIEETLKMQCEPETPTE |
| CasM.283262 | 38 | MNKVVKLALICEQSDKDNSPVDYKKINEILWELQKQTREIKNKAIQYCW |
| | | EYNNFSSDYYKKFNEYPKEKDILSYTLVGFVNDKFKTGNDLYSGNCSTT |
| | | VRNACTEFKNSKKELIKGSRSIINYRSNQPLDIHNKCIRIEFENNCFYTYLK |
| | | LLNRPAFKKYNFANTEIKFKILVRDNSTKTILERCISNEYEIAASKLLYDQ |
| | | KKKCWFLNLVYAFEIKSNNSLDPNKILGVDLGIHYPICASVYGSLDRFTI |
| | | DGGEIDEFRRRVESRKISMLKQGKNCGDGRIGHGIKARNKPVYNIEDKIA |
| | | RFRDTANHKYSRALIEYAVKHTCGTIQMEDLTGITDIANRFLKNWSYYD |
| | | LQTKIEYKAKEAGINIVYIDPKNTSRRCSKCGYIDKENRETQSRFICLKCG |
| | | FKENADYNASQNIGIKDIDKLIKEDVH |
| CasM.284833 | 39 | VTLLVKVVKIYLISEQFDKAGNQIDYKEVNKILWELQKQTREAKNKTVQ |
| | | LLWEWNNFSSDYVKASGIYPKAKDIFGYSSVHGQANKELRTKLALNSSN |
| | | LSTTTMDVCKIFNTYKKEVWEGKRSVPSYKSDQPLDLHKESIKLIYENNE |
| | | FYVRLALLKKAEFAKYGFKDGFRFKMQVKDNSTKTILERCFDEVYKINA |
| | | SKLLYDQKKKKWKLNLSYSFDNKNISELDKEKILGVDVGVNCPLVASVF |
| | | GDRDRFIIKGGEIEKFRKSVEARRRSMLEQTKYCGDGRIGHGRKKRTEPA |
| | | LNIGDKIARFRDTTNHKYSRALIEYAVKKGCGTIQMEKLTGITSKSDRFL |
| | | KDWTYYDLQTKIENKAKEVGINVVYIAPKYTSQRCSKCGYIHKDNRPNQ |
| | | AKFRCLECDFESNADYNASQNIGIKNIDKIIEKDLQKQESEVQVNENK |
| CasM.287700 | 40 | MNKVVKLALICEQSDKNNSPVDYKKVNEILWELQKQTREIKNKTIQYC |
| | | WEYYNFSSDYYKKFNKYPKEKDILSYTLWGFINDKFKTGNDLYSGNCS |
| | | ATTKKVIKEFKNSKKELIRGSRSIINYKSNQPLNIHNKCIHLQFKNNNFYV |
| | | SINLLNRRSFKKYNFANTAIKFKILVRDNSTKAILERCISNEYKISESQLIY |
| | | NKKKKCWFLNLSYAFEIKSNNSLDPNKILGVDLGIHYPICASVYGSLDRF |
| | | TIDGGEIDEFRRRVESRKISMLKQGKNCGDGRIGHGIKARNKPVYNIEDK |
| | | IARFRDTANHKYSRALIEYAVKNNCGTIQMEDLTGITDNANRFLKNWSY |
| | | YDLQTKIEYKAKEASINVVYINPENTSRRCSKCGYIDKENRKTQSSFICLK |
| | | CGFKENADYNASQNISIKDIDKLIKEDVH |
| CasM.291507 | 41 | VTLLVKVVKIHLISEQFDKAGNRIDYEEVNKILWELQKQTREAKNKTVQ |
| | | LLWEWNNFSSDYVKASGIYPKAKDIFGYSSVHGQANKELRTKLALNSSN |
| | | LSTTTMDVCKNFNTYKKEVWKGKRSVPSYKSDQPLDLHKDSIKLIYENN |
| | | QFYVRLALLKKAEFAKYGFKDGFHFKMQVKDNSTKTILERCFDEVYKIN |
| | | ASKLLYDQKKKKWKLNLSYSFDNKNISELDKEKILGVDVGVSYPLVASV |
| | | FGDRDRFKIKGGEIEKFRKSVEARRRSMLEQTKYCGDGRIGHGRKKRTE |
| | | PALNIGDKIARFRDTTNHKYSRALIEYAVKKGCGTIQMEKLTGITSKADR |
| | | FLKDWTYYDLQTKIENKAKEVGINVVYIAPKYTSQRCSKCGYIHKDNRP |
| | | NQAKFRCLECDFESNADYNASQNIGIKNIDKIIEKDLQKQESEVQVNENK |
| CasM.293410 | 42 | LIWKDALGGIILTKIVKLYLISEQIDKDGNRVDYKEINSILWNLQKQTRDI |
| | | KNKTVQLCWEWMNFSSDYYKKNELYPNEKEILNLTLRGYAYDHFKQG |
| | | YDLYSSNISVLTEAVCGAFKNAKKEMLNGEKSVLSYKAEQPLDIHKKCI |
| | | KLEYDKNFYVKLKMLNKAGKKKYGIEDDLNFKIQVEDKSTRTILERCID |
| | | GEYVVSGSKLIYDKKKKLWKLNLCYSFKANEIESLDKNKILGIDLGIACP |
| | | LMASVNGEFDRFSIKGGEIETFRKRIEARKRSVLHQTKYCGDGRIGHGRN |
| | | KRTEPAYKINDKIARFRDTANHKYSRALIDYAIRKNCGMIQMENLTGISD |
| | | KKEHFLKEWSYYDLQTKIENKAKEKGIKIVYINPEYTSQRCSKCGYIDAN |
| | | NRELRAVFKCQKCGFEADADYNASQNIGIKNIEDIIENTLKISSANEKQTK |
| | | NT |
| CasM.295105 | 43 | VFYSTFLCYILTKYIDFSANECYNINTSSEVKQLMNKVVKLALICEQSDK |
| | | DNSPVDYKKINEILWELQKQTREIKNKAIQYCWEYNNFSSDYYKKFNEY |
| | | PKEKDILSYTLVGFVNDKFKTGNDLYSGNCSTTVRNACTEFKNSKKELIK |
| | | GSRSIINYRSNQPLDIHNKCIRIEFENNCFYTYLKLLNRPAFKKYNFANTEI |
| | | KFKILVRDNSTKTILERCISNEYEIAASKLLYDQKKKCWFLNLVYAFEIKS |
| | | NNSLDPNKILGVDLGIHYPICASVYGSLDRFTIDGGEIDEFRRRVESRKIS |
| | | MLKQGKNCGDGRIGHGIKARNKPVYNIEDKIARFRDTANHKYSRALIEY |
| | | AVKHTCGTIQMEDLTGITDIANRFLKNWSYYDLQTKIEYKAKEAGINIVY |
| | | IDPKNTSRRCSKCGYIDKENRETQSRFICLKCGFKENADYNASQNIGIKDI |
| | | DKLIKEDVH |
| CasM.295187 | 44 | LISEQIDKDGNRVDYKEINSILWNLQKQTRDIKNKTVQLCWEWMNFSSD |
| | | YYKKNELYPNEKEILNLTLRGYAYDHFKQGYDLYSSNISVLTEAVCGAF |
| | | KNAKKEMLNGEKSVLSYKAEQPLDIHKKCIKLEYDKNFYVKLKMLNKA |
| | | GKKKYGIEDDLNFKIQVEDKSTRTILERCIDGEYVVSGSKLIYDKKKKLW |
| | | KLNLCYSFKANEIESLDKNKILGIDLGIACPLMASVNGEFDRFSIKGGEIE |
| | | TFRKRIEARKRSVLHQTKYCGDGRIGHGRNKRTEPAYKINDKIARFRDT |
| | | ANHKYSRALIDYAIRKNCGMIQMENLTGISDNKEHFLKEWSYYDLQTKI |
| | | ENKAKEKGIKIVYINPEYTSQRCSKCGYIDANNRELRAVFKCQNCGFEA |
| | | DADYNASQNIGIKNIEDIIENTLKISSANEKQTKNT |
| CasM.295929 | 45 | LVKVVKIYLISEQVDEQGKDVDYNTICGVLWDLQWETREIKNKTVQLC |
| | | WEWSGFSSDYYKKYGEYPKEKNLLDYTMGGFVYDKLKSKYHLYTANL |
| | | STTSQNTCGIFRTYKVDFVKGNRSVLSFKADQPLDVHKKSISIDRIDDNY |
| | | FVKLKLLNKSGIQKYGIRDDFHFRMLVKDNSTKTILERCVGGDYKAAAS |
| | | KIIYDKKKKMWCLNLSYEFDVNTAKDLNKNRILGIDIGIVYPVVASVNG |
| | | ELDRFVIQGGEIETFRRRVENRKKSLLKQTKYCGDGRIGHGRNKRTEPV |
| | | DIISDQIARFRNTANHKYSRAVIDYAVRKQCGTIQMENLKGITDKSDRFL |
| | | KNWSYYDLQQKIEYKAKEKGINVVFINPKYTSQRCSRCGYIDSANRPKL |
| | | PNQSKFLCIKCGFTENADYNASQNIALYNIEKLIDAEA |
| CasΦ.1 | 46 | MADTPTLFTQFLRHHLPGQRFRKDILKQAGRILANKGEDATIAFLRGKSE |
| | | ESPPDFQPPVKCPIIACSRPLTEWPIYQASVAIQGYVYGQSLAEFEASDPG |
| | | CSKDGLLGWFDKTGVCTDYFSVQGLNLIFQNARKRYIGVQTKVTNRNE |
| | | KRHKKLKRINAKRIAEGLPELTSDEPESALDETGHLIDPPGLNTNIYCYQQ |
| | | VSPKPLALSEVNQLPTAYAGYSTSGDDPIQPMVTKDRLSISKGQPGYIPE |
| | | HQRALLSQKKHRRMRGYGLKARALLVIVRIQDDWAVIDLRSLLRNAYW |
| | | RRIVQTKEPSTITKLLKLVTGDPVLDATRMVATFTYKPGIVQVRSAKCLK |
| | | NKQGSKLFSERYLNETVSVTSIDLGSNNLVAVATYRLVNGNTPELLQRF |
| | | TLPSHLVKDFERYKQAHDTLEDSIQKTAVASLPQGQQTEIRMWSMYGFR |
| | | EAQERVCQELGLADGSIPWNVMTATSTILTDLFLARGGDPKKCMFTSEP |
| | | KKKKNSKQVLYKIRDRAWAKMYRTLLSKETREAWNKALWGLKRGSPD |
| | | YARLSKRKEELARRCVNYTISTAEKRAQCGRTIVALEDLNIGFFHGRGK |
| | | QEPGWVGLFTRKKENRWLMQALHKAFLELAHHRGYHVIEVNPAYTSQ |
| | | TCPVCRHCDPDNRDQHNREAFHCIGCGFRGNADLDVATHNIAMVAITG |
| | | ESLKRARGSVASKTPQPLAAE |
| CasΦ.2 | 47 | MPKPAVESEFSKVLKKHFPGERFRSSYMKRGGKILAAQGEEAVVAYLQ |
| | | GKSEEEPPNFQPPAKCHVVTKSRDFAEWPIMKASEAIQRYIYALSTTERA |
| | | ACKPGKSSESHAAWFAATGVSNHGYSHVQGLNLIFDHTLGRYDGVLKK |
| | | VQLRNEKARARLESINASRADEGLPEIKAEEEEVATNETGHLLQPPGINPS |
| | | FYVYQTISPQAYRPRDEIVLPPEYAGYVRDPNAPIPLGVVRNRCDIQKGC |
| | | PGYIPEWQREAGTAISPKTGKAVTVPGLSPKKNKRMRRYWRSEKEKAQ |
| | | DALLVTVRIGTDWVVIDVRGLLRNARWRTIAPKDISLNALLDLFTGDPVI |
| | | DVRRNIVTFTYTLDACGTYARKWTLKGKQTKATLDKLTATQTVALVAI |
| | | DLGQTNPISAGISRVTQENGALQCEPLDRFTLPDDLLKDISAYRIAWDRN |
| | | EEELRARSVEALPEAQQAEVRALDGVSKETARTQLCADFGLDPKRLPW |
| | | DKMSSNTTFISEALLSNSVSRDQVFFTPAPKKGAKKKAPVEVMRKDRTW |
| | | ARAYKPRLSVEAQKLKNEALWALKRTSPEYLKLSRRKEELCRRSINYVI |
| | | EKTRRRTQCQIVIPVIEDLNVRFFHGSGKRLPGWDNFFTAKKENRWFIQG |
| | | LHKAFSDLRTHRSFYVFEVRPERTSITCPKCGHCEVGNRDGEAFQCLSCG |
| | | KTCNADLDVATHNLTQVALTGKTMPKREEPRDAQGTAPARKTKKASKS |
| | | KAPPAEREDQTPAQEPSQTS |
| CasΦ.3 | 48 | MYILEMADLKSEPSLLAKLLRDRFPGKYWLPKYWKLAEKKRLTGGEEA |
| | | ACEYMADKQLDSPPPNFRPPARCVILAKSRPFEDWPVHRVASKAQSFVI |
| | | GLSEQGFAALRAAPPSTADARRDWLRSHGASEDDLMALEAQLLETIMG |
| | | NAISLHGGVLKKIDNANVKAAKRLSGRNEARLNKGLQELPPEQEGSAYG |
| | | ADGLLVNPPGLNLNIYCRKSCCPKPVKNTARFVGHYPGYLRDSDSILISG |
| | | TMDRLTIIEGMPGHIPAWQREQGLVKPGGRRRRLSGSESNMRQKVDPST |
| | | GPRRSTRSGTVNRSNQRTGRNGDPLLVEIRMKEDWVLLDARGLLRNLR |
| | | WRESKRGLSCDHEDLSLSGLLALFSGDPVIDPVRNEVVFLYGEGIIPVRST |
| | | KPVGTRQSKKLLERQASMGPLTLISCDLGQTNLIAGRASAISLTHGSLGV |
| | | RSSVRIELDPEIIKSFERLRKDADRLETEILTAAKETLSDEQRGEVNSHEK |
| | | DSPQTAKASLCRELGLHPPSLPWGQMGPSTTFIADMLISHGRDDDAFLSH |
| | | GEFPTLEKRKKFDKRFCLESRPLLSSETRKALNESLWEVKRTSSEYARLS |
| | | QRKKEMARRAVNFVVEISRRKTGLSNVIVNIEDLNVRIFHGGGKQAPGW |
| | | DGFFRPKSENRWFIQAIHKAFSDLAAHHGIPVIESDPQRTSMTCPECGHC |
| | | DSKNRNGVRFLCKGCGASMDADFDAACRNLERVALTGKPMPKPSTSCE |
| | | RLLSATTGKVCSDHSLSHDAIEKAS |
| CasΦ.4 | 49 | MEKEITELTKIRREFPNKKFSSTDMKKAGKLLKAEGPDAVRDFLNSCQEI |
| | | IGDFKPPVKTNIVSISRPFEEWPVSMVGRAIQEYYFSLTKEELESVHPGTS |
| | | SEDHKSFFNITGLSNYNYTSVQGLNLIFKNAKAIYDGTLVKANNKNKKL |
| | | EKKFNEINHKRSLEGLPIITPDFEEPFDENGHLNNPPGINRNIYGYQGCAA |
| | | KVFVPSKHKMVSLPKEYEGYNRDPNLSLAGFRNRLEIPEGEPGHVPWFQ |
| | | RMDIPEGQIGHVNKIQRFNFVHGKNSGKVKFSDKTGRVKRYHHSKYKD |
| | | ATKPYKFLEESKKVSALDSILAHITIGDDWVVFDIRGLYRNVFYRELAQK |
| | | GLTAVQLLDLFTGDPVIDPKKGVVTFSYKEGVVPVFSQKIVPRFKSRDTL |
| | | EKLTSQGPVALLSVDLGQNEPVAARVCSLKNINDKITLDNSCRISFLDDY |
| | | KKQIKDYRDSLDELEIKIRLEAINSLETNQQVEIRDLDVFSADRAKANTV |
| | | DMFDIDPNLISWDSMSDARVSTQISDLYLKNGGDESRVYFEINNKRIKRS |
| | | DYNISQLVRPKLSDSTRKNLNDSIWKLKRTSEEYLKLSKRKLELSRAVVN |
| | | YTIRQSKLLSGINDIVIILEDLDVKKKFNGRGIRDIGWDNFFSSRKENRWFI |
| | | PAFHKAFSELSSNRGLCVIEVNPAWTSATCPDCGFCSKENRDGINFTCRK |
| | | CGVSYHADIDVATLNIARVAVLGKPMSGPADRERLGDTKKPRVARSRK |
| | | TMKRKDISNSTVEAMVTA |
| CasΦ.5 | 50 | MDMLDTETNYATETPAQQQDYSPKPPKKAQRAPKGFSKKARPEKKPPK |
| | | PITLFTQKHFSGVRFLKRVIRDASKILKLSESRTITFLEQAIERDGSAPPDV |
| | | TPPVHNTIMAVTRPFEEWPEVILSKALQKHCYALTKKIKIKTWPKKGPGK |
| | | KCLAAWSARTKIPLIPGQVQATNGLFDRIGSIYDGVEKKVTNRNANKKL |
| | | EYDEAIKEGRNPAVPEYETAYNIDGTLINKPGYNPNLYITQSRTPRLITEA |
| | | DRPLVEKILWQMVEKKTQSRNQARRARLEKAAHLQGLPVPKFVPEKVD |
| | | RSQKIEIRIIDPLDKIEPYMPQDRMAIKASQDGHVPYWQRPFLSKRRNRR |
| | | VRAGWGKQVSSIQAWLTGALLVIVRLGNEAFLADIRGALRNAQWRKLL |
| | | KPDATYQSLFNLFTGDPVVNTRINHLTMAYREGVVNIVKSRSFKGRQTR |
| | | EHLLTLLGQGKTVAGVSFDLGQKHAAGLLAAHFGLGEDGNPVFTPIQAC |
| | | FLPQRYLDSLTNYRNRYDALTLDMRRQSLLALTPAQQQEFADAQRDPG |
| | | GQAKRACCLKLNLNPDEIRWDLVSGISTMISDLYIERGGDPRDVHQQVE |
| | | TKPKGKRKSEIRILKIRDGKWAYDFRPKIADETRKAQREQLWKLQKASS |
| | | EFERLSRYKINIARAIANWALQWGRELSGCDIVIPVLEDLNVGSKFFDGK |
| | | GKWLLGWDNRFTPKKENRWFIKVLHKAVAELAPHRGVPVYEVMPHRT |
| | | SMTCPACHYCHPTNREGDRFECQSCHVVKNTDRDVAPYNILRVAVEGK |
| | | TLDRWQAEKKPQAEPDRPMILIDNQES |
| CasΦ.6 | 51 | MDMLDTETNYATETPAQQQDYSPKPPKKAQRAPKGFSKKARPEKKPPK |
| | | PITLFTQKHFSGVRFLKRVIRDASKILKLSESRTITFLEQAIERDGSAPPDV |
| | | TPPVHNTIMAVTRPFEEWPEVILSKALQKHCYALTKKIKIKTWPKKGPGK |
| | | KCLAAWSARTKIPLIPGQVQATNGLFDRIGSIYDGVEKKVTNRNANKKL |
| | | EYDEAIKEGRNPAVPEYETAYNIDGTLINKPGYNPNLYITQSRTPRLITEA |
| | | DRPLVEKILWQMVEKKTQSRNQARRARLEKAAHLQGLPVPKFVPEKVD |
| | | RSQKIEIRIIDPLDKIEPYMPQDRMAIKASQDGHVPYWQRPFLSKRRNRR |
| | | VRAGWGKQVSSIQAWLTGALLVIVRLGNEAFLADIRGALRNAQWRKLL |
| | | KPDATYQSLFNLFTGDPVVNTRTNHLTMAYREGVVDIVKSRSFKGRQTR |
| | | EHLLTLLGQGKTVAGVSFDLGQKHAAGLLAAHFGLGEDGNPVFTPIQAC |
| | | FLPQRYLDSLTNYRNRYDALTLDMRRQSLLALTPAQQQEFADAQRDPG |
| | | GQAKRACCLKLNLNPDEIRWDLVSGISTMISDLYIERGGDPRDVHQQVE |
| | | TKPKGKRKSEIRILKIRDGKWAYDFRPKIADETRKAQREQLWKLQKASS |
| | | EFERLSRYKINIARAIANWALQWGRELSGCDIVIPVLEDLNVGSKFFDGK |
| | | GKWLLGWDNRFTPKKENRWFIKVLHKAVAELAPHKGVPVYEVMPHRT |
| | | SMTCPACHYCHPTNREGDRFECQSCHVVKNTDRDVAPYNILRVAVEGK |
| | | TLDRWQAEKKPQAEPDRPMILIDNQES |
| CasΦ.7 | 52 | MSSLPTPLELLKQKHADLFKGLQFSSKDNKMAGKVLKKDGEEAALAFL |
| | | SERGVSRGELPNFRPPAKTLVVAQSRPFEEFPIYRVSEAIQLYVYSLSVKE |
| | | LETVPSGSSTKKEHQRFFQDSSVPDFGYTSVQGLNKIFGLARGIYLGVITR |
| | | GENQLQKAKSKHEALNKKRRASGEAETEFDPTPYEYMTPERKLAKPPG |
| | | VNHSIMCYVDISVDEFDFRNPDGIVLPSEYAGYCREINTAIEKGTVDRLG |
| | | HLKGGPGYIPGHQRKESTTEGPKINFRKGRIRRSYTALYAKRDSRRVRQG |
| | | KLALPSYRHHMMRLNSNAESAILAVIFFGKDWVVFDLRGLLRNVRWRN |
| | | LFVDGSTPSTLLGMFGDPVIDPKRGVVAFCYKEQIVPVVSKSITKMVKAP |
| | | ELLNKLYLKSEDPLVLVAIDLGQTNPVGVGVYRVMNASLDYEVVTRFA |
| | | LESELLREIESYRQRTNAFEAQIRAETFDAMTSEEQEEITRVRAFSASKAK |
| | | ENVCHRFGMPVDAVDWATMGSNTIHIAKWVMRHGDPSLVEVLEYRKD |
| | | NEIKLDKNGVPKKVKLTDKRIANLTSIRLRFSQETSKHYNDTMWELRRK |
| | | HPVYQKLSKSKADFSRRVVNSIIRRVNHLVPRARIVFIIEDLKNLGKVFHG |
| | | SGKRELGWDSYFEPKSENRWFIQVLHKAFSETGKHKGYYIIECWPNWTS |
| | | CTCPKCSCCDSENRHGEVFRCLACGYTCNTDFGTAPDNLVKIATTGKGL |
| | | PGPKKRCKGSSKGKNPKIARSSETGVSVTESGAPKVKKSSPTQTSQSSSQ |
| | | SAP |
| CasΦ.8 | 53 | MNKIEKEKTPLAKLMNENFAGLRFPFAIIKQAGKKLLKEGELKTIEYMTG |
| | | KGSIEPLPNFKPPVKCLIVAKRRDLKYFPICKASCEIQSYVYSLNYKDFMD |
| | | YFSTPMTSQKQHEEFFKKSGLNIEYQNVAGLNLIFNNVKNTYNGVILKV |
| | | KNRNEKLKKKAIKNNYEFEEIKTFNDDGCLINKPGINNVIYCFQSISPKIL |
| | | KNITHLPKEYNDYDCSVDRNIIQKYVSRLDIPESQPGHVPEWQRKLPEFN |
| | | NTNNPRRRRKWYSNGRNISKGYSVDQVNQAKIEDSLLAQIKIGEDWIILD |
| | | IRGLLRDLNRRELISYKNKLTIKDVLGFFSDYPIIDIKKNLVTFCYKEGVIQ |
| | | VVSQKSIGNKKSKQLLEKLIENKPIALVSIDLGQTNPVSVKISKLNKINNKI |
| | | SIESFTYRFLNEEILKEIEKYRKDYDKLELKLINEA |
| CasΦ.9 | 54 | MDMLDTETNYATETPSQQQDYSPKPPKKDRRAPKGFSKKARPEKKPPKP |
| | | ITLFTQKHFSGVRFLKRVIRDASKILKLSESRTITFLEQAIERDGSAPPDVT |
| | | PPVHNTIMAVTRPFEEWPEVILSKALQKHCYALTKKIKIKTWPKKGPGK |
| | | KCLAAWSARTKIPLIPGQVQATNGLFDRIGSIYDGVEKKVTNRNANKKL |
| | | EYDEAIKEGRNPAVPEYETAYNIDGTLINKPGYNPNLYITQSRTPRLITEA |
| | | DRPLVEKILWQMVEKKTQSRNQARRARLEKAAHLQGLPVPKFVPEKVD |
| | | RSQKIEIRIIDPLDKIEPYMPQDRMAIKASQDGHVPYWQRPFLSKRRNRR |
| | | VRAGWGKQVSSIQAWLTGALLVIVRLGNEAFLADIRGALRNAQWRKLL |
| | | KPDATYQSLFNLFTGDPVVNTRTNHLTMAYREGVVDIVKSRSFKGRQTR |
| | | EHLLTLLGQGKTVAGVSFDLGQKHAAGLLAAHFGLGEDGNPVFTPIQAC |
| | | FLPQRYLDSLTNYRNRYDALTLDMRRQSLLALTPAQQQEFADAQRDPG |
| | | GQAKRACCLKLNLNPDEIRWDLVSGISTMISDLYIERGGDPRDVHQQVE |
| | | TKPKGKRKSEIRILKIRDGKWAYDFRPKIADETRKAQREQLWKLQKASS |
| | | EFERLSRYKINIARAIANWALQWGRELSGCDIVIPVLEDLNVGSKFFDGK |
| | | GKWLLGWDNRFTPKKENRWFIKVLHKAVAELAPHRGVPVYEVMPHRT |
| | | SMTCPACHYCHPTNREGDRFECQSCHVVKNTDRDVAPYNILRVAVEGK |
| | | TLDRWQAEKKPQAEPDRPMILIDNQES |
| CasΦ.10 | 55 | MDMLDTETNYATETPSQQQDYSPKPPKKDRRAPKGFSKKARPEKKPPKP |
| | | ITLFTQKHFSGVRFLKRVIRDASKILKLSESRTITFLEQAIERDGSAPPDVT |
| | | PPVHNTIMAVTRPFEEWPEVILSKALQKHCYALTKKIKIKTWPKKGPGK |
| | | KCLAAWSARTKIPLIPGQVQATNGLFDRIGSIYDGVEKKVTNRNANKKL |
| | | EYDEAIKEGRNPAVPEYETAYNIDGTLINKPGYNPNLYITQSRTPRLITEA |
| | | DRPLVEKILWQMVEKKTQSRNQARRARLEKAAHLQGLPVPKFVPEKVD |
| | | RSQKIEIRIIDPLDKIEPYMPQDRMAIKASQDGHVPYWQRPFLSKRRNRR |
| | | VRAGWGKQVSSIQAWLTGALLVIVRLGNEAFLADIRGALRNAQWRKLL |
| | | KPDATYQSLFNLFTGDPVVNTRTNHLTMAYREGVVNIVKSRSFKGRQTR |
| | | EHLLTLLGQGKTVAGVSFDLGQKHAAGLLAAHFGLGEDGNPVFTPIQAC |
| | | FLPQRYLDSLTNYRNRYDALTLDMRRQSLLALTPAQQQEFADAQRDPG |
| | | GQAKRACCLKLNLNPDEIRWDLVSGISTMISDLYIERGGDPRDVHQQVE |
| | | TKPKGKRKSEIRILKIRDGKWAYDFRPKIADETRKAQREQLWKLQKASS |
| | | EFERLSRYKINIARAIANWALQWGRELSGCDIVIPVLEDLNVGSKFFDGK |
| | | GKWLLGWDNRFTPKKENRWFIKVLHKAVAELAPHRGVPVYEVMPHRT |
| | | SMTCPACHYCHPTNREGDRFECQSCHVVKNTDRDVAPYNILRVAVEGK |
| | | TLDRWQAEKKPQAEPDRPMILIDNQES |
| CasΦ.11 | 56 | MSNKTTPPSPLSLLLRAHFPGLKFESQDYKIAGKKLRDGGPEAVISYLTG |
| | | KGQAKLKDVKPPAKAFVIAQSRPFIEWDLVRVSRQIQEKIFGIPATKGRP |
| | | KQDGLSETAFNEAVASLEVDGKSKLNEETRAAFYEVLGLDAPSLHAQA |
| | | QNALIKSAISIREGVLKKVENRNEKNLSKTKRRKEAGEEATFVEEKAHDE |
| | | RGYLIHPPGVNQTIPGYQAVVIKSCPSDFIGLPSGCLAKESAEALTDYLPH |
| | | DRMTIPKGQPGYVPEWQHPLLNRRKNRRRRDWYSASLNKPKATCSKRS |
| | | GTPNRKNSRTDQIQSGRFKGAIPVLMRFQDEWVIIDIRGLLRNARYRKLL |
| | | KEKSTIPDLLSLFTGDPSIDMRQGVCTFIYKAGQACSAKMVKTKNAPEIL |
| | | SELTKSGPVVLVSIDLGQTNPIAAKVSRVTQLSDGQLSHETLLRELLSNDS |
| | | SDGKEIARYRVASDRLRDKLANLAVERLSPEHKSEILRAKNDTPALCKA |
| | | RVCAALGLNPEMIAWDKMTPYTEFLATAYLEKGGDRKVATLKPKNRPE |
| | | MLRRDIKFKGTEGVRIEVSPEAAEAYREAQWDLQRTSPEYLRLSTWKQE |
| | | LTKRILNQLRHKAAKSSQCEVVVMAFEDLNIKMMHGNGKWADGGWD |
| | | AFFIKKRENRWFMQAFHKSLTELGAHKGVPTIEVTPHRTSITCTKCGHCD |
| | | KANRDGERFACQKCGFVAHADLEIATDNIERVALTGKPMPKPESERSGD |
| | | AKKSVGARKAAFKPEEDAEAAE |
| CasΦ.12 | 57 | MIKPTVSQFLTPGFKLIRNHSRTAGLKLKNEGEEACKKFVRENEIPKDEC |
| | | PNFQGGPAIANIIAKSREFTEWEIYQSSLAIQEVIFTLPKDKLPEPILKEEW |
| | | RAQWLSEHGLDTVPYKEAAGLNLIIKNAVNTYKGVQVKVDNKNKNNL |
| | | AKINRKNEIAKLNGEQEISFEEIKAFDDKGYLLQKPSPNKSIYCYQSVSPK |
| | | PFITSKYHNVNLPEEYIGYYRKSNEPIVSPYQFDRLRIPIGEPGYVPKWQY |
| | | TFLSKKENKRRKLSKRIKNVSPILGIICIKKDWCVFDMRGLLRTNHWKKY |
| | | HKPTDSINDLFDYFTGDPVIDTKANVVRFRYKMENGIVNYKPVREKKGK |
| | | ELLENICDQNGSCKLATVDVGQNNPVAIGLFELKKVNGELTKTLISRHPT |
| | | PIDFCNKITAYRERYDKLESSIKLDAIKQLTSEQKIEVDNYNNNFTPQNTK |
| | | QIVCSKLNINPNDLPWDKMISGTHFISEKAQVSNKSEIYFTSTDKGKTKD |
| | | VMKSDYKWFQDYKPKLSKEVRDALSDIEWRLRRESLEFNKLSKSREQD |
| | | ARQLANWISSMCDVIGIENLVKKNNFFGGSGKREPGWDNFYKPKKENR |
| | | WWINAIHKALTELSQNKGKRVILLPAMRTSITCPKCKYCDSKNRNGEKF |
| | | NCLKCGIELNADIDVATENLATVAITAQSMPKPTCERSGDAKKPVRARK |
| | | AKAPEFHDKLAPSYTVVLREAV |
| CasΦ.13 | 58 | MRQPAEKTAFQVFRQEVIGTQKLSGGDAKTAGRLYKQGKMEAAREWL |
| | | LKGARDDVPPNFQPPAKCLVVAVSHPFEEWDISKTNHDVQAYIYAQPLQ |
| | | AEGHLNGLSEKWEDTSADQHKLWFEKTGVPDRGLPVQAINKIAKAAVN |
| | | RAFGVVRKVENRNEKRRSRDNRIAEHNRENGLTEVVREAPEVATNADG |
| | | FLLHPPGIDPSILSYASVSPVPYNSSKHSFVRLPEEYQAYNVEPDAPIPQFV |
| | | VEDRFAIPPGQPGYVPEWQRLKCSTNKHRRMRQWSNQDYKPKAGRRA |
| | | KPLEFQAHLTRERAKGALLVVMRIKEDWVVFDVRGLLRNVEWRKVLSE |
| | | EAREKLTLKGLLDLFTGDPVIDTKRGIVTFLYKAEITKILSKRTVKTKNAR |
| | | DLLLRLTEPGEDGLRREVGLVAVDLGQTHPIAAAIYRIGRTSAGALESTV |
| | | LHRQGLREDQKEKLKEYRKRHTALDSRLRKEAFETLSVEQQKEIVTVSG |
| | | SGAQITKDKVCNYLGVDPSTLPWEKMGSYTHFISDDFLRRGGDPNIVHF |
| | | DRQPKKGKVSKKSQRIKRSDSQWVGRMRPRLSQETAKARMEADWAAQ |
| | | NENEEYKRLARSKQELARWCVNTLLQNTRCITQCDEIVVVIEDLNVKSL |
| | | HGKGAREPGWDNFFTPKTENRWFIQILHKTFSELPKHRGEHVIEGCPLRT |
| | | SITCPACSYCDKNSRNGEKFVCVACGATFHADFEVATYNLVRLATTGMP |
| | | MPKSLERQGGGEKAGGARKARKKAKQVEKIVVQANANVTMNGASLHS |
| | | P |
| CasΦ.14 | 59 | MSSLPTPLELLKQKHADLFKGLQFSSKDNKMAGKVLKKDGEEAALAFL |
| | | SERGVSRGELPNFRPPAKTLVVAQSRPFEEFPIYRVSEAIQLYVYSLSVKE |
| | | LETVPSGSSTKKEHQRFFQDSSVPDFGYTSVQGLNKIFGLARGIYLGVITR |
| | | GENQLQKAKSKHEALNKKRRASGEAETEFDPTPYEYMTPERKLAKPPG |
| | | VNHSIMCYVDISVDEFDFRNPDGIVLPSEYAGYCREINTAIEKGTVDRLG |
| | | HLKGGPGYIPGHQRKESTTEGPKINFRKGRIRRSYTALYAKRDSRRVRQG |
| | | KLALPSYRHHMMRLNSNAESAILAVIFFGKDWVVFDLRGLLRNVRWRN |
| | | LFVDGSTPSTLLGMFGDPVIDPKRGVVAFCYKEQIVPVVSKSITKMVKAP |
| | | ELLNKLYLKSEDPLVLVAIDLGQTNPVGVGVYRVMNASLDYEVVTRFA |
| | | LESELLREIESYRQRTNAFEAQIRAETFDAMTSEEQEEITRVRAFSASKAK |
| | | ENVCHRFGMPVDAVDWATMGSNTIHIAKWVMRHGDPSLVEVLEYRKD |
| | | NEIKLDKNGVPKKVKLTDKRIANLTSIRLRFSQETSKHYNDTMWELRRK |
| | | HPVYQKLSKSKADFSRRVVNSIIRRVNHLVPRARIVFIIEDLKNLGKVFHG |
| | | SGKRELGWDSYFEPKSENRWFIQVLHKAFSETGKHKGYYIIECWPNWTS |
| | | CTCPKCSCCDSENRHGEVFRCLACGYTCNTDFGTAPDNLVKIATTGKGL |
| | | PGPKKRCKGSSKGKNPKIARSSETGVSVTESGAPKVKKSSPTQTSQSSSQ |
| | | SAP |
| CasΦ.15 | 60 | MIKPTVSQFLTPGFKLIRNHSRTAGLKLKNEGEEACKKFVRENEIPKDEC |
| | | PNFQGGPAIANIIAKSREFTEWEIYQSSLAIQEVIFTLPKDKLPEPILKEEW |
| | | RAQWLSEHGLDTVPYKEAAGLNLIIKNAVNTYKGVQVKVDNKNKNNL |
| | | AKINRKNEIAKLNGEQEISFEEIKAFDDKGYLLQKPSPNKSIYCYQSVSPK |
| | | PFITSKYHNVNLPEEYIGYYRKSNEPIVSPYQFDRLRIPIGEPGYVPKWQY |
| | | TFLSKKENKRRKLSKRIKNVSPILGIICIKKDWCVFDMRGLLRTNHWKKY |
| | | HKPTDSINDLFDYFTGDPVIDTKANVVRFRYKMENGIVNYKPVREKKGK |
| | | ELLENICDQNGSCKLATVDVGQNNPVAIGLFELKKVNGELTKTLISRHPT |
| | | PIDFCNKITAYRERYDKLESSIKLDAIKQLTSEQKIEVDNYNNNFTPQNTK |
| | | QIVCSKLNINPNDLPWDKMISGTHFISEKAQVSNKSEIYFTSTDKGKTKD |
| | | VMKSDYKWFQDYKPKLSKEVRDALSDIEWRLRRESLEFNKLSKSREQD |
| | | ARQLANWISSMCDVIGIENLVKKNNFFGGSGKREPGWDNFYKPKKENR |
| | | WWINAIHKALTELSQNKGKRVILLPAMRTSITCPKCKYCDSKNRNGEKF |
| | | NCLKCGIELNADIDVATENLATVAITAQSMPKPTCERSGDAKKPVRARK |
| | | AKAPEFHDKLAPSYTVVLREAV |
| CasΦ.16 | 61 | MSNKTTPPSPLSLLLRAHFPGLKFESQDYKIAGKKLRDGGPEAVISYLTG |
| | | KGQAKLKDVKPPAKAFVIAQSRPFIEWDLVRVSRQIQEKIFGIPATKGRP |
| | | KQDGLSETAFNEAVASLEVDGKSKLNEETRAAFYEVLGLDAPSLHAQA |
| | | QNALIKSAISIREGVLKKVENRNEKNLSKTKRRKEAGEEATFVEEKAHDE |
| | | RGYLIHPPGVNQTIPGYQAVVIKSCPSDFIGLPSGCLAKESAEALTDYLPH |
| | | DRMTIPKGQPGYVPEWQHPLLNRRKNRRRRDWYSASLNKPKATCSKRS |
| | | GTPNRKNSRTDQIQSGRFKGAIPVLMRFQDEWVIIDIRGLLRNARYRKLL |
| | | KEKSTIPDLLSLFTGDPSIDMRQGVCTFIYKAGQACSAKMVKTKNAPEIL |
| | | SELTKSGPVVLVSIDLGQTNPIAAKVSRVTQLSDGQLSHETLLRELLSNDS |
| | | SDGKEIARYRVASDRLRDKLANLAVERLSPEHKSEILRAKNDTPALCKA |
| | | RVCAALGLNPEMIAWDKMTPYTEFLATAYLEKGGDRKVATLKPKNRPE |
| | | MLRRDIKFKGTEGVRIEVSPEAAEAYREAQWDLQRTSPEYLRLSTWKQE |
| | | LTKRILNQLRHKAAKSSQCEVVVMAFEDLNIKMMHGNGKWADGGWD |
| | | AFFIKKRENRWFMQAFHKSLTELGAHKGVPTIEVTPHRTSITCTKCGHCD |
| | | KANRDGERFACQKCGFVAHADLEIATDNIERVALTGKPMPKPESERSGD |
| | | AKKSVGARKAAFKPEEDAEAAE |
| CasΦ.17 | 62 | MYSLEMADLKSEPSLLAKLLRDRFPGKYWLPKYWKLAEKKRLTGGEEA |
| | | ACEYMADKQLDSPPPNFRPPARCVILAKSRPFEDWPVHRVASKAQSFVI |
| | | GLSEQGFAALRAAPPSTADARRDWLRSHGASEDDLMALEAQLLETIMG |
| | | NAISLHGGVLKKIDNANVKAAKRLSGRNEARLNKGLQELPPEQEGSAYG |
| | | ADGLLVNPPGLNLNIYCRKSCCPKPVKNTARFVGHYPGYLRDSDSILISG |
| | | TMDRLTIIEGMPGHIPAWQREQGLVKPGGRRRRLSGSESNMRQKVDPST |
| | | GPRRSTRSGTVNRSNQRTGRNGDPLLVEIRMKEDWVLLDARGLLRNLR |
| | | WRESKRGLSCDHEDLSLSGLLALFSGDPVIDPVRNEVVFLYGEGIIPVRST |
| | | KPVGTRQSKKLLERQASMGPLTLISCDLGQTNLIAGRASAISLTHGSLGV |
| | | RSSVRIELDPEIIKSFERLRKDADRLETEILTAAKETLSDEQRGEVNSHEK |
| | | DSPQTAKASLCRELGLHPPSLPWGQMGPSTTFIADMLISHGRDDDAFLSH |
| | | GEFPTLEKRKKFDKRFCLESRPLLSSETRKALNESLWEVKRTSSEYARLS |
| | | QRKKEMARRAVNFVVEISRRKTGLSNVIVNIEDLNVRIFHGGGKQAPGW |
| | | DGFFRPKSENRWFIQAIHKAFSDLAAHHGIPVIESDPQRTSMTCPECGHC |
| | | DSKNRNGVRFLCKGCGASMDADFDAACRNLERVALTGKPMPKPSTSCE |
| | | RLLSATTGKVCSDHSLSHDAIEKAS |
| CasΦ.18 | 63 | MEKEITELTKIRREFPNKKFSSTDMKKAGKLLKAEGPDAVRDFLNSCQEI |
| | | IGDFKPPVKTNIVSISRPFEEWPVSMVGRAIQEYYFSLTKEELESVHPGTS |
| | | SEDHKSFFNITGLSNYNYTSVQGLNLIFKNAKAIYDGTLVKANNKNKKL |
| | | EKKFNEINHKRSLEGLPIITPDFEEPFDENGHLNNPPGINRNIYGYQGCAA |
| | | KVFVPSKHKMVSLPKEYEGYNRDPNLSLAGFRNRLEIPEGEPGHVPWFQ |
| | | RMDIPEGQIGHVNKIQRFNFVHGKNSGKVKFSDKTGRVKRYHHSKYKD |
| | | ATKPYKFLEESKKVSALDSILAIITIGDDWVVFDIRGLYRNVFYRELAQK |
| | | GLTAVQLLDLFTGDPVIDPKKGVVTFSYKEGVVPVFSQKIVPRFKSRDTL |
| | | EKLTSQGPVALLSVDLGQNEPVAARVCSLKNINDKITLDNSCRISFLDDY |
| | | KKQIKDYRDSLDELEIKIRLEAINSLETNQQVEIRDLDVFSADRAKANTV |
| | | DMFDIDPNLISWDSMSDARVSTQISDLYLKNGGDESRVYFEINNKRIKRS |
| | | DYNISQLVRPKLSDSTRKNLNDSIWKLKRTSEEYLKLSKRKLELSRAVVN |
| | | YTIRQSKLLSGINDIVIILEDLDVKKKFNGRGIRDIGWDNFFSSRKENRWFI |
| | | PAFHKTFSELSSNRGLCVIEVNPAWTSATCPDCGFCSKENRDGINFTCRK |
| | | CGVSYHADIDVATLNIARVAVLGKPMSGPADRERLGDTKKPRVARSRK |
| | | TMKRKDISNSTVEAMVTA |
| CasΦ.19 | 64 | MLVRTSTLVQDNKNSRSASRAFLKKPKMPKNKHIKEPTELAKLIRELFPG |
| | | QRFTRAINTQAGKILKHKGRDEVVEFLKNKGIDKEQFMDFRPPTKARIV |
| | | ATSGAIEEFSYLRVSMAIQECCFGKYKFPKEKVNGKLVLETVGLTKEELD |
| | | DFLPKKYYENKKSRDRFFLKTGICDYGYTYAQGLNEIFRNTRAIYEGVFT |
| | | KVNNRNEKRREKKDKYNEERRSKGLSEEPYDEDESATDESGHLINPPGV |
| | | NLNIWTCEGFCKGPYVTKLSGTPGYEVILPKVFDGYNRDPNEIISCGITDR |
| | | FAIPEGEPGHIPWHQRLEIPEGQPGYVPGHQRFADTGQNNSGKANPNKK |
| | | GRMRKYYGHGTKYTQPGEYQEVFRKGHREGNKRRYWEEDFRSEAHDC |
| | | ILYVIHIGDDWVVCDLRGPLRDAYRRGLVPKEGITTQELCNLFSGDPVID |
| | | PKHGVVTFCYKNGLVRAQKTISAGKKSRELLGALTSQGPIALIGVDLGQ |
| | | TEPVGARAFIVNQARGSLSLPTLKGSFLLTAENSSSWNVFKGEIKAYREA |
| | | IDDLAIRLKKEAVATLSVEQQTEIESYEAFSAEDAKQLACEKFGVDSSFIL |
| | | WEDMTPYHTGPATYYFAKQFLKKNGGNKSLIEYIPYQKKKSKKTPKAV |
| | | LRSDYNIACCVRPKLLPETRKALNEAIRIVQKNSDEYQRLSKRKLEFCRR |
| | | VVNYLVRKAKKLTGLERVIIAIEDLKSLEKFFTGSGKRDNGWSNFFRPKK |
| | | ENRWFIPAFHKAFSELAPNRGFYVIECNPARTSITDPDCGYCDGDNRDGI |
| | | KFECKKCGAKHHTDLDVAPLNIAIVAVTGRPMPKTVSNKSKRERSGGEK |
| | | SVGASRKRNHRKSKANQEMLDATSSAAE |
| CasΦ.20 | 65 | MPKIKKPTEISLLRKEVFPDLHFAKDRMRAASLVLKNEGREAAIEYLRVN |
| | | HEDKPPNFMPPAKTPYVALSRPLEQWPIAQASIAIQKYIFGLTKDEFSATK |
| | | KLLYGDKSTPNTESRKRWFEVTGVPNFGYMSAQGLNAIFSGALARYEG |
| | | VVQKVENRNKKRFEKLSEKNQLLIEEGQPVKDYVPDTAYHTPETLQKLA |
| | | ENNHVRVEDLGDMIDRLVHPPGIHRSIYGYQQVPPFAYDPDNPKGIILPK |
| | | AYAGYTRKPHDIIEAMPNRLNIPEGQAGYIPEHQRDKLKKGGRVKRLRT |
| | | TRVRVDATETVRAKAEALNAEKARLRGKEAILAVFQIEEDWALIDMRG |
| | | LLRNVYMRKLIAAGELTPTTLLGYFTETLTLDPRRTEATFCYHLRSEGAL |
| | | HAEYVRHGKNTRELLLDLTKDNEKIALVTIDLGQRNPLAAAIFRVGRDA |
| | | SGDLTENSLEPVSRMLLPQAYLDQIKAYRDAYDSFRQNIWDTALASLTP |
| | | EQQRQILAYEAYTPDDSKENVLRLLLGGNVMPDDLPWEDMTKNTHYIS |
| | | DRYLADGGDPSKVWFVPGPRKRKKNAPPLKKPPKPRELVKRSDHNISHL |
| | | SEFRPQLLKETRDAFEKAKIDTERGHVGYQKLSTRKDQLCKEILNWLEA |
| | | EAVRLTRCKTMVLGLEDLNGPFFNQGKGKVRGWVSFFRQKQENRWIV |
| | | NGFRKNALARAHDKGKYILELWPSWTSQTCPKCKHVHADNRHGDDFV |
| | | CLQCGARLHADAEVATWNLAVVAIQGHSLPGPVREKSNDRKKSGSARK |
| | | SKKANESGKVVGAWAAQATPKRATSKKETGTARNPVYNPLETQASCPA |
| | | P |
| CasΦ.21 | 66 | MTPSPQIARLVETPLAAALKAHHPGKKFRSDYLKKAGKILKDQGVEAA |
| | | MAHLDGKDQAEPPNFKPPAKCRIVARSREFSEWPIVKASVEIQKYIYGLT |
| | | LEERKACDPGKSSASHKAWFAKTGVNTFGYSSVQGFNLIFGHTLGRYDG |
| | | VLVKTENLNKKRAEKNERFRAKALAEGRAEPVCPPLVTATNDTGQDVT |
| | | LEDGRVVRPGQLLQPPGINPNIYAYQQVSPKAYVPGIIELPEEFQGYSRDP |
| | | NAVILPLVPRDRLSIPKGQPGYVPEPHREGLTGRKDRRMRRYYETERGT |
| | | KLKRPPLTAKGRADKANEALLVVVRIDSDWVVMDVRGLLRNARWRRL |
| | | VSKEGITLNGLLDLFTGDPVLNPKDCSVSRDTGDPVNDPRHGVVTFCYK |
| | | LGVVDVCSKDRPIKGFRTKEVLERLTSSGTVGMVSIDLGQTNPVAAAVS |
| | | RVTKGLQAETLETFTLPDDLLGKVRAYRAKTDRMEEGFRRNALRKLTA |
| | | EQQAEITRYNDATEQQAKALVCSTYGIGPEEVPWERMTSNTTYISDHILD |
| | | HGGDPDTVFFMATKRGQNKPTLHKRKDKAWGQKFRPAISVETRLARQA |
| | | AEWELRRASLEFQKLSVWKTELCRQAVNYVMERTKKRTQCDVIIPVIED |
| | | LPVPLFHGSGKRDPGWANFFVHKRENRWFIDGLHKAFSELGKHRGIYVF |
| | | EVCPQRTSITCPKCGHCDPDNRDGEKFVCLSCQATLNADLDVATTNLVR |
| | | VALTGKVMPRSERSGDAQTPGPARKARTGKIKGSKPTSAPQGATQTDA |
| | | KAHLSQTGV |
| CasΦ.22 | 67 | MTPSPQIARLVETPLAAALKAHHPGKKFRSDYLKKAGKILKDQGVEAA |
| | | MAHLDGKDQAEPPNFKPPAKCRIVARSREFSEWPIVKASVEIQKYIYGLT |
| | | LEERKACDPGKSSASHKAWFAKTGVNTFGYSSVQGFNLIFGHTLGRYDG |
| | | VLVKTENLNKKRAEKNERFRAKALAEGRAEPVCPPLVTATNDTGQDVT |
| | | LEDGRVVRPGQLLQPPGINPNIYAYQQVSPKAYVPGIIELPEEFQGYSRDP |
| | | NAVILPLVPRDRLSIPKGQPGYVPEPHREGLTGRKDRRMRRYYETERGT |
| | | KLKRPPLTAKGRADKANEALLVVVRIDSDWVVMDVRGLLRNARWRRL |
| | | VSKEGITLNGLLDLFTGDPVLNPKDCSVSRDTGDPVNDPRHGVVTFCYK |
| | | LGVVDVCSKDRPIKGFRTKEVLERLTSSGTVGMVSIDLGQTNPVAAAVS |
| | | RVTKGLQAETLETFTLPDDLLGKVRAYRAKTDRMEEGFRRNALRKLTA |
| | | EQQAEITRYNDATEQQAKALVCSTYGIGPEEVPWERMTSNTTYISDHILD |
| | | HGGDPDTVFFMATKRGQNKPTLHKRKDKAWGQKFRPAISVETRLARQA |
| | | AEWELRRASLEFQKLSVWKTELCRQAVNYVMERTKKRTQCDVIIPVIED |
| | | LPVPLFHGSGKRDPGWANFFVHKRENRWFIDGLHKAFSELGKHRGIYVF |
| | | EVCPQRTSITCPKCGHCDPDNRDGEKFVCLSCQATLHADLDVATTNLVR |
| | | VALTGKVMPRSERSGDAQTPGPARKARTGKIKGSKPTSAPQGATQTDA |
| | | KAHLSQTGV |
| CasΦ.23 | 68 | MKTEKPKTALTLLREEVFPGKKYRLDVLKEAGKKLSTKGREATIEFLTG |
| | | KDEERPQNFQPPAKTSIVAQSRPFDQWPIVQVSLAVQKYIYGLTQSEFEA |
| | | NKKALYGETGKAISTESRRAWFEATGVDNFGFTAAQGINPIFSQAVARY |
| | | EGVIKKVENRNEKKLKKLTKKNLLRLESGEEIEDFEPEATFNEEGRLLQP |
| | | PGANPNIYCYQQISPRIYDPSDPKGVILPQIYAGYDRKPEDIISAGVPNRLA |
| | | IPEGQPGYIPEHQRAGLKTQGRIRCRASVEAKARAAILAVVHLGEDWVV |
| | | LDLRGLLRNVYWRKLASPGTLTLKGLLDFFTGGPVLDARRGIATFSYTL |
| | | KSAAAVHAENTYKGKGTREVLLKLTENNSVALVTVDLGQRNPLAAMIA |
| | | RVSRTSQGDLTYPESVEPLTRLFLPDPFLEEVRKYRSSYDALRLSIREAAI |
| | | ASLTPEQQAEIRYIEKFSAGDAKKNVAEVFGIDPTQLPWDAMTPRTTYIS |
| | | DLFLRMGGDRSRVFFEVPPKKAKKAPKKPPKKPAGPRIVKRTDGMIARL |
| | | REIRPRLSAETNKAFQEARWEGERSNVAFQKLSVRRKQFARTVVNHLVQ |
| | | TAQKMSRCDTVVLGIEDLNVPFFHGRGKYQPGWEGFFRQKKENRWLIN |
| | | DMHKALSERGPHRGGYVLELTPFWTSLRCPKCGHTDSANRDGDDFVCV |
| | | KCGAKLHSDLEVATANLALVAITGQSIPRPPREQSSGKKSTGTARMKKT |
| | | SGETQGKGSKACVSEALNKIEQGTARDPVYNPLNSQVSCPAP |
| CasΦ.24 | 69 | VYNPDMKKPNNIRRIREEHFEGLCFGKDVLTKAGKIYEKDGEEAAIDFL |
| | | MGKDEEDPPNFKPPAKTTIVAQSRPFDQWPIYQVSQAVQERVFAYTEEE |
| | | FNASKEALFSGDISSKSRDFWFKTNNISDQGIGAQGLNTILSHAFSRYSGV |
| | | IKKVENRNKKRLKKLSKKNQLKIEEGLEILEFKPDSAFNENGLLAQPPGI |
| | | NPNIYGYQAVTPFVFDPDNPGDVILPKQYEGYSRKPDDIIEKGPSRLDIPK |
| | | GQPGYVPEHQRKNLKKKGRVRLYRRTPPKTKALASILAVLQIGKDWVL |
| | | FDMRGLLRSVYMREAATPGQISAKDLLDTFTGCPVLNTRTGEFTFCYKL |
| | | RSEGALHARKIYTKGETRTLLTSLTSENNTIALVTVDLGQRNPAAIMISRL |
| | | SRKEELSEKDIQPVSRRLLPDRYLNELKRYRDAYDAFRQEVRDEAFTSLC |
| | | PEHQEQVQQYEALTPEKAKNLVLKHFFGTHDPDLPWDDMTSNTHYIAN |
| | | LYLERGGDPSKVFFTRPLKKDSKSKKPRKPTKRTDASISRLPEIRPKMPED |
| | | ARKAFEKAKWEIYTGHEKFPKLAKRVNQLCREIANWIEKEAKRLTLCDT |
| | | VVVGIEDLSLPPKRGKGKFQETWQGFFRQKFENRWVIDTLKKAIQNRAH |
| | | DKGKYVLGLAPYWTSQRCPACGFIHKSNRNGDHFKCLKCEALFHADSE |
| | | VATWNLALVAVLGKGITNPDSKKPSGQKKTGTTRKKQIKGKNKGKETV |
| | | NVPPTTQEVEDIIAFFEKDDETVRNPVYKPTGT |
| CasΦ.25 | 70 | MKKPNNIRRIREEHFEGLCFGKDVLTKAGKIYEKDGEEAAIDFLMGKDE |
| | | EDPPNFKPPAKTTIVAQSRPFDQWPIYQVSQAVQERVFAYTEEEFNASKE |
| | | ALFSGDISSKSRDFWFKTNNISDQGIGAQGLNTILSHAFSRYSGVIKKVEN |
| | | RNKKRLKKLSKKNQLKIEEGLEILEFKPDSAFNENGLLAQPPGINPNIYGY |
| | | QAVTPFVFDPDNPGDVILPKQYEGYSRKPDDIIEKGPSRLDIPKGQPGYVP |
| | | EHQRKNLKKKGRVRLYRRTPPKTKALASILAVLQIGKDWVLFDMRGLL |
| | | RSVYMREAATPGQISAKDLLDTFTGCPVLNTRTGEFTFCYKLRSEGALH |
| | | ARKIYTKGETRTLLTSLTSENNTIALVTVDLGQRNPAAIMISRLSRKEELS |
| | | EKDIQPVSRRLLPDRYLNELKRYRDAYDAFRQEVRDEAFTSLCPEHQEQ |
| | | VQQYEALTPEKAKNLVLKHFFGTHDPDLPWDDMTSNTHYIANLYLERG |
| | | GDPSKVFFTRPLKKDSKSKKPRKPTKRTDASISRLPEIRPKMPEDARKAFE |
| | | KAKWEIYTGHEKFPKLAKRVNQLCREIANWIEKEAKRLTLCDTVVVGIE |
| | | DLSLPPKRGKGKFQETWQGFFRQKFENRWVIDTLKKAIQNRAHDKGKY |
| | | VLGLAPYWTSQRCPACGFIHKSNRNGDHFKCLKCEALFHADSEVATWN |
| | | LALVAVLGKGITNPDSKKPSGQKKTGTTRKKQIKGKNKGKETVNVPPTT |
| | | QEVEDIIAFFEKDDETVRNPVYKPTGT |
| CasΦ.26 | 71 | VIKTHFPAGRFRKDHQKTAGKKLKHEGEEACVEYLRNKVSDYPPNFKPP |
| | | AKGTIVAQSRPFSEWPIVRASEAIQKYVYGLTVAELDVFSPGTSKPSHAE |
| | | WFAKTGVENYGYRQVQGLNTIFQNTVNRFKGVLKKVENRNKKSLKRQ |
| | | EGANRRRVEEGLPEVPVTVESATDDEGRLLQPPGVNPSIYGYQGVAPRV |
| | | CTDLQGFSGMSVDFAGYRRDPDAVLVESLPEGRLSIPKGERGYVPEWQR |
| | | DPERNKFPLREGSRRQRKWYSNACHKPKPGRTSKYDPEALKKASAKDA |
| | | LLVSISIGEDWAIIDVRGLLRDARRRGFTPEEGLSLNSLLGLFTEYPVFDV |
| | | QRGLITFTYKLGQVDVHSRKTVPTFRSRALLESLVAKEEIALVSVDLGQT |
| | | NPASMKVSRVRAQEGALVAEPVHRMFLSDVLLGELSSYRKRMDAFEDA |
| | | IRAQAFETMTPEQQAEITRVCDVSVEVARRRVCEKYSISPQDVPWGEMT |
| | | GHSTFIVDAVLRKGGDESLVYFKNKEGETLKFRDLRISRMEGVRPRLTK |
| | | DTRDALNKAVLDLKRAHPTFAKLAKQKLELARRCVNFIEREAKRYTQC |
| | | ERVVFVIEDLNVGFFHGKGKRDRGWDAFFTAKKENRWVIQALHKAFSD |
| | | LGLHRGSYVIEVTPQRTSMTCPRCGHCDKGNRNGEKFVCLQCGATLHA |
| | | DLEVATDNIERVALTGKAMPKPPVRERSGDVQKAGTARKARKPLKPKQ |
| | | KTEPSVQEGSSDDGVDKSPGDASRNPVYNPSDTLSI |
| CasΦ.27 | 72 | MAKAKTLAALLRELLPGQHLAPHHRWVANKLLMTSGDAAAFVIGKSVS |
| | | DPVRGSFRKDVITKAGRIFKKDGPDAAAAFLDGKWEDRPPNFQPPAKAA |
| | | IVAISRSFDEWPIVKVSCAIQQYLYALPVQEFESSVPEARAQAHAAWFQD |
| | | TGVDDCNFKSTQGLNAIFNHGKRTYEGVLKKAQNRNDKKNLRLERINA |
| | | KRAEAGQAPLVAGPDESPTDDAGCLLHPPGINANIYCYQQVSPRPYEQS |
| | | CGIQLPPEYAGYNRLSNVAIPPMPNRLDIPQGQPGYVPEHHRHGIKKFGR |
| | | VRKRYGVVPGRNRDADGKRTRQVLTEAGAAAKARDSVLAVIRIGDDW |
| | | TVVDLRGLLRNAQWRKLVPDGGITVQGLLDLFTGDPVIDPRRGVVTFIY |
| | | KADSVGIHSEKVCRGKQSKNLLERLCAMPEKSSTRLDCARQAVALVSV |
| | | DLGQRNPVAARFSRVSLAEGQLQAQLVSAQFLDDAMVAMIRSYREEYD |
| | | RFESLVREQAKAALSPEQLSEIVRHEADSAESVKSCVCAKFGIDPAGLSW |
| | | DKMTSGTWRIADHVQAAGGDVEWFFFKTCGKGKEIKTVRRSDFNVAK |
| | | QFRLRLSPETRKDWNDAIWELKRGNPAYVSFSKRKSEFARRVVNDLVH |
| | | RARRAVRCDEVVFAIEDLNISFFHGKGQRQMGWDAFFEVKQENRWFIQ |
| | | ALHKAFVERATHKGGYVLEVAPARTSTTCPECRHCDPESRRGEQFCCIK |
| | | CRHTCHADLEVATFNIEQVALTGVSLPKRLSSTLL |
| CasΦ.28 | 73 | MSKEKTPPSAYAILKAKHFPDLDFEKKHKMMAGRMFKNGASEQEVVQ |
| | | YLQGKGSESLMDVKPPAKSPILAQSRPFDEWEMVRTSRLIQETIFGIPKRG |
| | | SIPKRDGLSETQFNELVASLEVGGKPMLNKQTRAIFYGLLGIKPPTFHAM |
| | | AQNILIDLAINIRKGVLKKVDNLNEKNRKKVKRIRDAGEQDVMVPAEVT |
| | | AHDDRGYLNHPPGVNPTIPGYQGVVIPFPEGFEGLPSGMTPVDWSHVLV |
| | | DYLPHDRLSIPKGSPGYIPEWQRPLLNRHKGRRHRSWYANSLNKPRKSR |
| | | TEEAKDRQNAGKRTALIEAERLKGVLPVLMRFKEDWLIIDARGLLRNAR |
| | | YRGVLPEGSTLGNLIDLFSDSPRVDTRRGICTFLYRKGRAYSTKPVKRKE |
| | | SKETLLKLTEKSTIALVSIDLGQTNPLTAKLSKVRQVDGCLVAEPVLRKLI |
| | | DNASEDGKEIARYRVAHDLLRARILEDAIDLLGIYKDEVVRARSDTPDLC |
| | | KERVCRFLGLDSQAIDWDRMTPYTDFIAQAFVAKGGDPKVVTIKPNGKP |
| | | KMFRKDRSIKNMKGIRLDISKEASSAYREAQWAIQRESPDFQRLAVWQS |
| | | QLTKRIVNQLVAWAKKCTQCDTVVLAFEDLNIGMMHGSGKWANGGW |
| | | NALFLHKQENRWFMQAFHKALTELSAHKGIPTIEVLPHRTSITCTQCGHC |
| | | HPGNRDGERFKCLKCEFLANTDLEIATDNIERVALTGLPMPKGERSSAKR |
| | | KPGGTRKTKKSKHSGNSPLAAE |
| CasΦ.29 | 74 | MEKAGPTSPLSVLIHKNFEGCRFQIDHLKIAGRKLAREGEAAAIEYLLDK |
| | | KCEGLPPNFQPPAKGNVIAQSRPFTEWAPYRASVAIQKYIYSLSVDERKV |
| | | CDPGSSSDSHEKWFKQTGVQNYGYTHVQGLNLIFKHALARYDGVLKKV |
| | | DNRNEKNRKKAERVNSFRREEGLPEEVFEEEKATDETGHLLQPPGVNHS |
| | | IYCYQSVRPKPFNPRKPGGISLPEAYSGYSLKPQDELPIGSLDRLSIPPGQP |
| | | GYVPEWQRSQLTTQKHRRKRSWYSAQKWKPRTGRTSTFDPDRLNCAR |
| | | AQGAILAVVRIHEDWVVFDVRGLLRNALWRELAGKGLTVRDLLDFFTG |
| | | DPVVDTKRGVVTFTYKLGKVDVHSLRTVRGKRSKKVLEDLTLSSDVGL |
| | | VTIDLGQTNVLAADYSKVTRSENGELLAVPLSKSFLPKHLLHEVTAYRTS |
| | | YDQMEEGFRRKALLTLTEDQQVEVTLVRDFSVESSKTKLLQLGVDVTSL |
| | | PWEKMSSNTTYISDQLLQQGADPASLFFDGERDGKPCRHKKKDRTWAY |
| | | LVRPKVSPETRKALNEALWALKNTSPEFESLSKRKIQFSRRCMNYLLNE |
| | | AKRISGCGQVVFVIEDLNVRVHHGRGKRAIGWDNFFKPKRENRWFMQA |
| | | LHKAASELAIHRGMHIIEACPARSSITCPKCGHCDPENRCSSDREKFLCVK |
| | | CGAAFHADLEVATFNLRKVALTGTALPKSIDHSRDGLIPKGARNRKLKE |
| | | PQANDEKACA |
| CasΦ.30 | 75 | MKEQSPLSSVLKSNFPGKKFLSADIRVAGRKLAQLGEAAAVEYLSPRQR |
| | | DSVPNFRPPAFCTVVAKSRPFEEWPIYKASVLLQEQIYGMTGQEFEERCG |
| | | SIPTSLSGLRQWASSVGLGAAMEGLHVQGMNLMVKNAINRYKGVLVK |
| | | VENRNKKLVEANEAKNSSREERGLPPLRPPELGSAFGPDGRLVNPPGIDK |
| | | SIRLYQGVSPVPVVKTTGRPTVHRLDIPAGEKGHVPLWQREAGLVKEGP |
| | | RRRRMWYSNSNLKRSRKDRSAEASEARKADSVVVRVSVKEDWVDIDV |
| | | RGLLRNVAWRGIERAGESTEDLLSLFSGDPVVDPSRDSVVFLYKEGVVD |
| | | VLSKKVVGAGKSRKQLEKMVSEGPVALVSCDLGQTNYVAARVSVLDES |
| | | LSPVRSFRVDPREFPSADGSQGVVGSLDRIRADSDRLEAKLLSEAEASLP |
| | | EPVRAEIEFLRSERPSAVAGRLCLKLGIDPRSIPWEKMGSTTSFISEALSAK |
| | | GSPLALHDGAPIKDSRFAHAARGRLSPESRKALNEALWERKSSSREYGVI |
| | | SRRKSEASRRMANAVLSESRRLTGLAVVAVNLEDLNMVSKFFHGRGKR |
| | | APGWAGFFTPKMENRWFIRSIHKAMCDLSKHRGITVIESRPERTSISCPEC |
| | | GHCDPENRSGERFSCKSCGVSLHADFEVATRNLERVALTGKPMPRRENL |
| | | HSPEGATASRKTRKKPREATASTFLDLRSVLSSAENEGSGPAARAG |
| CasΦ.31 | 76 | MLPPSNKIGKSMSLKEFINKRNFKSSIIKQAGKILKKEGEEAVKKYLDDN |
| | | YVEGYKKRDFPITAKCNIVASNRKIEDFDISKFSSFIQNYVFNLNKDNFEE |
| | | FSKIKYNRKSFDELYKKIANEIGLEKPNYENIQGEIAVIRNAINIYNGVLK |
| | | KVENRNKKIQEKNQSKDPPKLLSAFDDNGFLAERPGINETIYGYQSVRLR |
| | | HLDVEKDKDIIVQLPDIYQKYNKKSTDKISVKKRLNKYNVDEYGKLISK |
| | | RRKERINKDDAILCVSNFGDDWIIFDARGLLRQTYRYKLKKKGLCIKDLL |
| | | NLFTGDPIINPTKTDLKEALSLSFKDGIINNRTLKVKNYKKCPELISELIRD |
| | | KGKVAMISIDLGQTNPISYRLSKFTANNVAYIENGVISEDDIVKMKKWRE |
| | | KSDKLENLIKEEAIASLSDDEQREVRLYENDIADNTKKKILEKFNIREEDL |
| | | DFSKMSNNTYFIRDCLKNKNIDESEFTFEKNGKKLDPTDACFAREYKNK |
| | | LSELTRKKINEKIWEIKKNSKEYHKISIYKKETIRYIVNKLIKQSKEKSECD |
| | | DIIVNIEKLQIGGNFFGGRGKRDPGWNNFFLPKEENRWFINACHKAFSEL |
| | | APHKGIIVIESDPAYTSQTCPKCENCDKENRNGEKFKCKKCNYEANADID |
| | | VATENLEKIAKNGRRLIKNFDQLGERLPGAEMPGGARKRKPSKSLPKNG |
| | | RGAGVGSEPELINQSPSQVIA |
| CasΦ.32 | 77 | VPDKKETPLVALCKKSFPGLRFKKHDSRQAGRILKSKGEGAAVAFLEGK |
| | | GGTTQPNFKPPVKCNIVAMSRPLEEWPIYKASVVIQKYVYAQSYEEFKA |
| | | TDPGKSEAGLRAWLKATRVDTDGYFNVQGLNLIFQNARATYEGVLKKV |
| | | ENRNSKKVAKIEQRNEHRAERGLPLLTLDEPETALDETGHLRHRPGINCS |
| | | VFGYQHMKLKPYVPGSIPGVTGYSRDPSTPIAACGVDRLEIPEGQPGYVP |
| | | PWDRENLSVKKHRRKRASWARSRGGAIDDNMLLAVVRVADDWALLD |
| | | LRGLLRNTQYRKLLDRSVPVTIESLLNLVTNDPTLSVVKKPGKPVRYTAT |
| | | LIYKQGVVPVVKAKVVKGSYVSKMLDDTTETFSLVGVDLGVNNLIAAN |
| | | ALRIRPGKCVERLQAFTLPEQTVEDFFRFRKAYDKHQENLRLAAVRSLT |
| | | AEQQAEVLALDTFGPEQAKMQVCGHLGLSVDEVPWDKVNSRSSILSDL |
| | | AKERGVDDTLYMFPFFKGKGKKRKTEIRKRWDVNWAQHFRPQLTSETR |
| | | KALNEAKWEAERNSSKYHQLSIRKKELSRHCVNYVIRTAEKRAQCGKVI |
| | | VAVEDLHHSFRRGGKGSRKSGWGGFFAAKQEGRWLMDALFGAFCDLA |
| | | VHRGYRVIKVDPYNTSRTCPECGHCDKANRDRVNREAFICVCCGYRGN |
| | | ADIDVAAYNIAMVAITGVSLRKAARASVASTPLESLAAE |
| CasΦ.33 | 78 | MSKTKELNDYQEALARRLPGVRHQKSVRRAARLVYDRQGEDAMVAFL |
| | | DGKEVDEPYTLQPPAKCHILAVSRPIEEWPIARVTMAVQEHVYALPVHE |
| | | VEKSRPETTEGSRSAWFKNSGVSNHGVTHAQTLNAILKNAYNVYNGVI |
| | | KKVENRNAKKRDSLAAKNKSRERKGLPHFKADPPELATDEQGYLLQPP |
| | | SPNSSVYLVQQHLRTPQIDLPSGYTGPVVDPRSPIPSLIPIDRLAIPPGQPG |
| | | YVPLHDREKLTSNKHRRMKLPKSLRAQGALPVCFRVFDDWAVVDGRG |
| | | LLRHAQYRRLAPKNVSIAELLELYTGDPVIDIKRNLMTFRFAEAVVEVTA |
| | | RKIVEKYHNKYLLKLTEPKGKPVREIGLVSIDLNVQRLIALAIYRVHQTG |
| | | ESQLALSPCLHREILPAKGLGDFDKYKSKFNQLTEEILTAAVQTLTSAQQ |
| | | EEYQRYVEESSHEAKADLCLKYSITPHELAWDKMTSSTQYISRWLRDHG |
| | | WNASDFTQITKGRKKVERLWSDSRWAQELKPKLSNETRRKLEDAKHDL |
| | | QRANPEWQRLAKRKQEYSRHLANTVLSMAREYTACETVVIAIENLPMK |
| | | GGFVDGNGSRESGWDNFFTHKKENRWMIKDIHKALSDLAPNRGVHVLE |
| | | VNPQYTSQTCPECGHRDKANRDPIQRERFCCTHCGAQRHADLEVATHNI |
| | | AMVATTGKSLTGKSLAPQRLQEAAE |
| CasΦ.41 | 79 | VLLSDRIQYTDPSAPIPAMTVVDRRKIKKGEPGYVPPFMRKNLSTNKHRR |
| | | MRLSRGQKEACALPVGLRLPDGKDGWDFIIFDGRALLRACRRLRLEVTS |
| | | MDDVLDKFTGDPRIQLSPAGETIVTCMLKPQHTGVIQQKLITGKMKDRL |
| | | VQLTAEAPIAMLTVDLGEHNLVACGAYTVGQRRGKLQSERLEAFLLPEK |
| | | VLADFEGYRRDSDEHSETLRHEALKALSKRQQREVLDMLRTGADQARE |
| | | SLCYKYGLDLQALPWDKMSSNSTFIAQHLMSLGFGESATHVRYRPKRK |
| | | ASERTILKYDSRFAAEEKIKLTDETRRAWNEAIWECQRASQEFRCLSVRK |
| | | LQLARAAVNWTLTQAKQRSRCPRVVVVVEDLNVRFMHGGGKRQEGW |
| | | AGFFKARSEKRWFIQALHKAYTELPTNRGIHVMEVNPARTSITCTKCGY |
| | | CDPENRYGEDFHCRNPKCKVRGGHVANADLDIATENLARVALSGPMPK |
| | | APKLK |
| CasΦ.34 | 80 | MTPSFGYQMIIVTPIHHASGAWATLRLLFLNPKTSGVMLGMTKTKSAFA |
| | | LMREEVFPGLLFKSADLKMAGRKFAKEGREAAIEYLRGKDEERPANFKP |
| | | PAKGDIIAQSRPFDQWPIVQVSQAIQKYIFGLTKAEFDATKTLLYGEGNH |
| | | PTTESRRRWFEATGVPDFGFTSAQGLNAIFSSALARYEGVIQKVENRNEK |
| | | RLKKLSEKNQRLVEEGHAVEAYVPETAFHTLESLKALSEKSLVPLDDLM |
| | | DKIDRLAQPPGINPCLYGYQQVAPYIYDPENPRGVVLPDLYLGYCRKPD |
| | | DPITACPNRLDIPKGQPGYIPEHQRGQLKKHGRVRRFRYTNPQAKARAK |
| | | AQTAILAVLRIDEDWVVMDLRGLLRNVYFREVAAPGELTARTLLDTFTG |
| | | CPVLNLRSNVVTFCYDIESKGALHAEYVRKGWATRNKLLDLTKDGQSV |
| | | ALLSVDLGQRHPVAVMISRLKRDDKGDLSEKSIQVVSRTFADQYVDKLK |
| | | RYRVQYDALRKEIYDAALVSLPPEQQAEIRAYEAFAPGDAKANVLSVMF |
| | | QGEVSPDELPWDKMNTNTHYISDLYLRRGGDPSRVFFVPQPSTPKKNAK |
| | | KPPAPRKPVKRTDENVSHMPEFRPHLSNETREAFQKAKWTMERGNVRY |
| | | AQLSRFLNQIVREANNWLVSEAKKLTQCQTVVWAIEDLHVPFFHGKGK |
| | | YHETWDGFFRQKKEDRWFVNVFHKAISERAPNKGEYVMEVAPYRTSQR |
| | | CPVCGFVDADNRHGDHFKCLRCGVELHADLEVATWNIALVAVQGHGIA |
| | | GPPREQSCGGETAGTARKGKNIKKNKGLADAVTVEAQDSEGGSKKDAG |
| | | TARNPVYIPSESQVNCPAP |
| CasΦ.35 | 81 | MKPKTPKPPKTPVAALIDKHFPGKRFRASYLKSVGKKLKNQGEDVAVRF |
| | | LTGKDEERPPNFQPPAKSNIVAQSRPIEEWPIHKVSVAVQEYVYGLTVAE |
| | | KEACSDAGESSSSHAAWFAKTGVENFGYTSVQGLNKIFPPTFNRFDGVIK |
| | | KVENRNEKKRQKATRINEAKRNKGQSEDPPEAEVKATDDAGYLLQPPGI |
| | | NHSVYGYQSITLCPYTAEKFPTIKLPEEYAGYHSNPDAPIPAGVPDRLAIP |
| | | EGQPGHVPEEHRAGLSTKKHRRVRQWYAMANWKPKPKRTSKPDYDRL |
| | | AKARAQGALLIVIRIDEDWVVVDARGLLRNVRWRSLGKREITPNELLDL |
| | | FTGDPVLDLKRGVVTFTYAEGVVNVCSRSTTKGKQTKVLLDAMTAPRD |
| | | GKKRQIGMVAVDLGQTNPIAAEYSRVGKNAAGTLEATPLSRSTLPDELL |
| | | REIALYRKAHDRLEAQLREEAVLKLTAEQQAENARYVETSEEGAKLAL |
| | | ANLGVDTSTLPWDAMTGWSTCISDHLINHGGDTSAVFFQTIRKGTKKLE |
| | | TIKRKDSSWADIVRPRLTKETREALNDFLWELKRSHEGYEKLSKRLEEL |
| | | ARRAVNHVVQEVKWLTQCQDIVIVIEDLNVRNFHGGGKRGGGWSNFFT |
| | | VKKENRWFMQALHKAFSDLAAHRGIPVLEVYPARTSITCLGCGHCDPEN |
| | | RDGEAFVCQQCGATFHADLEVATRNIARVALTGEAMPKAPAREQPGGA |
| | | KKRGTSRRRKLTEVAVKSAEPTIHQAKNQQLNGTSRDPVYKGSELPAL |
| CasΦ.43 | 82 | MSEITDLLKANFKGKTFKSADMRMAGRILKKSGAQAVIKYLSDKGAVD |
| | | PPDFRPPAKCNIIAQSRPFDEWPICKASMAIQQHIYGLTKNEFDESSPGTSS |
| | | ASHEQWFAKTGVDTHGFTHVQGLNLIFQHAKKRYEGVIKKVENYNEKE |
| | | RKKFEGINERRSKEGMPLLEPRLRTAFGDDGKFAEKPGVNPSIYLYQQTS |
| | | PRPYDKTKHPYVHAPFELKEITTIPTQDDRLKIPFGAPGHVPEKHRSQLS |
| | | MAKHKRRRAWYALSQNKPRPPKDGSKGRRSVRDLADLKAASLADAIPL |
| | | VSRVGFDWVVIDGRGLLRNLRWRKLAHEGMTVEEMLGFFSGDPVIDPR |
| | | RNVATFIYKAEHATVKSRKPIGGAKRAREELLKATASSDGVIRQVGLISV |
| | | DLGQTNPVAYEISRMHQANGELVAEHLEYGLLNDEQVNSIQRYRAAWD |
| | | SMNESFRQKAIESLSMEAQDEIMQASTGAAKRTREAVLTMFGPNATLPW |
| | | SRMSSNTTCISDALIEVGKEEETNFVTSNGPRKRTDAQWAAYLRPRVNP |
| | | ETRALLNQAVWDLMKRSDEYERLSKRKLEMARQCVNFVVARAEKLTQ |
| | | CNNIGIVLENLVVRNFHGSGRRESGWEGFFEPKRENRWFMQVLHKAFSD |
| | | LAQHRGVMVFEVHPAYSSQTCPACRYVDPKNRSSEDRERFKCLKCGRSF |
| | | NADREVATFNIREIARTGVGLPKPDCERSRGVQTTGTARNPGRSLKSNK |
| | | NPSEPKRVLQSKTRKKITSTETQNEPLATDLKT |
| CasΦ.44 | 83 | MTPKTESPLSALCKKHFPGKRFRTNYLKDAGKILKKHGEDAVVAFLSDK |
| | | QEDEPANFCPPAKVHILAQSRPFEDWPINLASKAIQTYVYGLTADERKTC |
| | | EPGTSKESHDRWFKETGVDHHGFTSVQGLNLIFKHTLNRYDGVIKKVET |
| | | RNEKRRSSVVRINEKKAAEGLPLIAAEAEETAFGEDGRLLQPPGVNHSIY |
| | | CFQQVSPQPYSSKKHPQVVLPHAVQGVDPDAPIPVGRPNRLDIPKGQPG |
| | | YVPEWQRPHLSMKCKRVRMWYARANWRRKPGRRSVLNEARLKEASA |
| | | KGALPIVLVIGDDWLVMDARGLLRSVFWRRVAKPGLSLSELLNVTPTGL |
| | | FSGDPVIDPKRGLVTFTSKLGVVAVHSRKPTRGKKSKDLLLKMTKPTDD |
| | | GMPRHVGMVAIDLGQTNPVAAEYSRVVQSDAGTLKQEPVSRGVLPDDL |
| | | LKDVARYRRAYDLTEESIRQEAIALLSEGHRAEVTKLDQTTANETKRLL |
| | | VDRGVSESLPWEKMSSNTTYISDCLVALGKTDDVFFVPKAKKGKKETGI |
| | | AVKRKDHGWSKLLRPRTSPEARKALNENQWAVKRASPEYERLSRRKLE |
| | | LGRRCVNHIIQETKRWTQCEDIVVVLEDLNVGFFHGSGKRPDGWDNFFV |
| | | SKRENRWFIQVLHKAFGDLATHRGTHVIEVHPARTSITCIKCGHCDAGN |
| | | RDGESFVCLASACGDRRHADLEVATRNVARVAITGERMPPSEQARDVQ |
| | | KAGGARKRKPSARNVKSSYPAVEPAPASP |
| CasΦ.36 | 84 | MSDNKMKKLSKEEKPLTPLQILIRKYIDKSQYPSGFKTTIIKQAGVRIKSV |
| | | KSEQDEINLANWIISKYDPTYIKRDFNPSAKCQIIATSRSVADFDIVKMSN |
| | | KVQEIFFASSHLDKNVFDIGKSKSDHDSWFERNNVDRGIYTYSNVQGMN |
| | | LIFSNTKNTYLGVAVKAQNKFSSKMKRIQDINNFRITNHQSPLPIPDEIKIY |
| | | DDAGFLLNPPGVNPNIFGYQSCLLKPLENKEIISKTSFPEYSRLPADMIEV |
| | | NYKISNRLKFSNDQKGFIQFKDKLNLFKINSQELFSKRRRLSGQPILLVAS |
| | | FGDDWVVLDGRGLLRQVYYRGIAKPGSITISELLGFFTGDPIVDPIRGVVS |
| | | LGFKPGVLSQETLKTTSARIFAEKLPNLVLNNNVGLMSIDLGQTNPVSYR |
| | | LSEITSNMSVEHICSDFLSQDQISSIEKAKTSLDNLEEEIAIKAVDHLSDED |
| | | KINFANFSKLNLPEDTRQSLFEKYPELIGSKLDFGSMGSGTSYIADELIKFE |
| | | NKDAFYPSGKKKFDLSFSRDLRKKLSDETRKSYNDALFLEKRTNDKYLK |
| | | NAKRRKQIVRTVANSLVSKIEELGLTPVINIENLAMSGGFFDGRGKREKG |
| | | WDNFFKVKKENRWVMKDFHKAFSELSPHHGVIVIESPPYCTSVTCTKCN |
| | | FCDKKNRNGHKFTCQRCGLDANADLDIATENLEKVAISGKRMPGSERSS |
| | | DERKVAVARKAKSPKGKAIKGVKCTITDEPALLSANSQDCSQSTS |
| CasΦ.37 | 85 | MALSLAEVRERHFKGLRFRSSYLKRAGKILKKEGEAACVAYLTGKDEES |
| | | PPNFKPPAKCDVVAQSRPFEEWPIVQASVAVQSYVYGLTKEAFEAFNPG |
| | | TTKQSHEACLAATGIDTCGYSNVQGLNLIFRQAKNRYEGVITKVENRNK |
| | | KAKKKLTRKNEWRQKNGHSELPEAPEELTFNDEGRLLQPPGINPSLYTY |
| | | QQISPTPWSPKDSSILPPQYAGYERDPNAPIPFGVAKDRLTIASGCPGYIPE |
| | | WMRTAGEKTNPRTQKKFMHPGLSTRKNKRMRLPRSVRSAPLGALLVTI |
| | | HLGEDWLVLDVRGLLRNARWRGVAPKDISTQGLLNLFTGDPVIDTRRG |
| | | VVTFTYKPETVGIHSRTWLYKGKQTKEVLEKLTQDQTVALVAIDLGQTN |
| | | PVSAAASRVSRSGENLSIETVDRFFLPDELIKELRLYRMAHDRLEERIREE |
| | | STLALTEAQQAEVRALEHVVRDDAKNKVCAAFNLDAASLPWDQMTSN |
| | | TTYLSEAILAQGVSRDQVFFTPNPKKGSKEPVEVMRKDRAWVYAFKAK |
| | | LSEETRKAKNEALWALKRASPDYARLSKRREELCRRSVNMVINRAKKR |
| | | TQCQVVIPVLEDLNIGFFHGSGKRLPGWDNFFVAKKENRWLMNGLHKS |
| | | FSDLAVHRGFYVFEVMPHRTSITCPACGHCDSENRDGEAFVCLSCKRTY |
| | | HADLDVATHNLTQVAGTGLPMPEREHPGGTKKPGGSRKPESPQTHAPIL |
| | | HRTDYSESADRLGS |
| CasΦ.45 | 86 | QAVIKYLSDKGAVDPPDFRPPAKCNIIAQSRPFDEWPICKASMAIQQHIY |
| | | GLTKNEFDESSPGTSSASHEQWFAKTGVDTHGFTHVQGLNLIFQHAKKR |
| | | YEGVIKKVENYNEKERKKFEGINERRSKEGMPLLEPRLRTAFGDDGKFA |
| | | EKPGVNPSIYLYQQTSPRPYDKTKHPYVHAPFELKEITTIPTQDDRLKIPF |
| | | GAPGHVPEKHRSQLSMAKHKRRRAWYALSQNKPRPPKDGSKGRRSVR |
| | | DLADLKAASLADAIPLVSRVGFDWVVIDGRGLLRNLRWRKLAHEGMTV |
| | | EEMLGFFSGDPVIDPRRNVATFIYKAEHATVKSRKPIGGAKRAREELLKA |
| | | TASSDGVIRQVGLISVDLGQTNPVAYEISRMHQANGELVAEHLEYGLLN |
| | | DEQVNSIQRYRAAWDSMNESFRQKAIESLSMEAQDEIMQASTGAAKRT |
| | | REAVLTMFGPNATLPWSRMSSNTTCISDALIEVGKEEETNFVTSNGPRKR |
| | | TDAQWAAYLRPRVNPETRALLNQAVWDLMKRSDEYERLSKRKLEMAR |
| | | QCVNFVVARAEKLTQCNNIGIVLENLVVRNFHGSGRRESGWEGFFEPKR |
| | | ENRWFMQVLHKAFSDLAQHRGVMVFEVHPAYSSQTCPACRYVDPKNR |
| | | SSEDRERFKCLKCGRSFNADREVATFNIREIARTGVGLPKPDCERSRDVQ |
| | | TPGTARKSGRSLKSQDNLSEPKRVLQSKTRKKITSTETQNEPLATDLKT |
| CasΦ.38 | 87 | MIKEQSELSKLIEKYYPGKKFYSNDLKQAGKHLKKSEHLTAKESEELTV |
| | | EFLKSCKEKLYDFRPPAKALIISTSRPFEEWPIYKASESIQKYIYSLTKEEL |
| | | EKYNISTDKTSQENFFKESLIDNYGFANVSGLNLIFQHTKAIYDGVLKKV |
| | | NNRNNKILKKYKRKIEEGIEIDSPELEKAIDESGHFINPPGINKNIYCYQQV |
| | | SPTIFNSFKETKIICPFNYKRNPNDIIQKGVIDRLAIPFGEPGYIPDHQRDKV |
| | | NKHKKRIRKYYKNNENKNKDAILAKINIGEDWVLFDLRGLLRNAYWRK |
| | | LIPKQGITPQQLLDMFSGDPVIDPIKNNITFIYKESIIPIHSESIIKTKKSKELL |
| | | EKLTKDEQIALVSIDLGQTNPVAARFSRLSSDLKPEHVSSSFLPDELKNEI |
| | | CRYREKSDLLEIEIKNKAIKMLSQEQQDEIKLVNDISSEELKNSVCKKYNI |
| | | DNSKIPWDKMNGFTTFIADEFINNGGDKSLVYFTAKDKKSKKEKLVKLS |
| | | DKKIANSFKPKISKETREILNKITWDEKISSNEYKKLSKRKLEFARRATNY |
| | | LINQAKKATRLNNVVLVVEDLNSKFFHGSGKREDGWDNFFIPKKENRW |
| | | FIQALHKSLTDVSIHRGINVIEVRPERTSITCPKCGCCDKENRKGEDFKCI |
| | | KCDSVYHADLEVATFNIEKVAITGESMPKPDCERLGGEESIG |
| CasΦ.39 | 88 | VAFLDGKEVDEPYTLQPPAKCHILAVSRPIEEWPIARVTMAVQEHVYAL |
| | | PVHEVEKSRPETTEGSRSAWFKNSGVSNHGVTHAQTLNAILKNAYNVY |
| | | NGVIKKVENRNAKKRDSLAAKNKSRERKGLPHFKADPPELATDEQGYL |
| | | LQPPSPNSSVYLVQQHLRTPQIDLPSGYTGPVVDPRSPIPSLIPIDRLAIPPG |
| | | QPGYVPLHDREKLTSNKHRRMKLPKSLRAQGALPVCFRVFDDWAVVD |
| | | GRGLLRHAQYRRLAPKNVSIAELLELYTGDPVIDIKRNLMTFRFAEAVVE |
| | | VTARKIVEKYHNKYLLKLTEPKGKPVREIGLVSIDLNVQRLIALAIYRVH |
| | | QTGESQLALSPCLHREILPAKGLGDFDKYKSKFNQLTEEILTAAVQTLTS |
| | | AQQEEYQRYVEESSHEAKADLCLKYSITPHELAWDKMTSSTQYISRWLR |
| | | DHGWNASDFTQITKGRKKVERLWSDSRWAQELKPKLSNETRRKLEDAK |
| | | HDLQRANPEWQRLAKRKQEYSRHLANTVLSMAREYTACETVVIAIENL |
| | | PMKGGFVDGNGSRESGWDNFFTHKKENRWMIKDIHKALSDLAPNRGV |
| | | HVLEVNPQYTSQTCPECGHRDKANRDPIQRERFCCTHCGAQRHADLEV |
| | | ATHNIAMVATTGKSLTGKSLAPQRLQ |
| CasΦ.42 | 89 | LEIPEGEPGHVPWFQRMDIPEGQIGHVNKIQRFNFVHGKNSGKVKFSDKT |
| | | GRVKRYHHSKYKDATKPYKFLEESKKVSALDSILAHITIGDDWVVFDIRG |
| | | LYRNVFYRELAQKGLTAVQLLDLFTGDPVIDPKKGIITFSYKEGVVPVFS |
| | | QKIVSRFKSRDTLEKLTSQGPVALLSVDLGQNEPVAARVCSLKNINDKIA |
| | | LDNSCRIPFLDDYKKQIKDYRDSLDELEIKIRLEAINSLDVNQQVEIRDLD |
| | | VFSADRAKASTVDMFDIDPNLISWDSMSDARFSTQISDLYLKNGGDESR |
| | | VYFEINNKRIKRSDYNISQLVRPKLSDSTRKNLNDSIWKLKRTSEEYLKLS |
| | | KRKLELSRAVVNYTIRQSKLLSGINDIVIILEDLDVKKKFNGRGIRDIGWD |
| | | NFFSSRKENRWFIPAFHKSFSELSSNRGLCVIEVNPAWTSATCPDCGFCSK |
| | | ENRDGINFTCRKCGVSYHADIDVATLNIARVAVLGKPMSGPADRERLGG |
| | | TKKPRVARSRKDMKRKDISNGTVEVMVTA |
| CasΦ.46 | 90 | IPSFGYLDRLKIAKGQPGYIPEWQRETINPSKKVRRYWATNHEKIRNAIPL |
| | | VVFIGDDWVIIDGRGLLRDARRRKLADKNTTIEQLLEMVSNDPVIDSTRG |
| | | IATLSYVEGVVPVRSFIPIGEKKGREYLEKSTQKESVTLLSVDIGQINPVSC |
| | | GVYKVSNGCSKIDFLDKFFLDKKHLDAIQKYRTLQDSLEASIVNEALDEI |
| | | DPSFKKEYQNINSQTSNDVKKSLCTEYNIDPEAISWQDITAHSTLISDYLI |
| | | DNNITNDVYRTVNKAKYKTNDFGWYKKFSAKLSKEAREALNEKIWELK |
| | | IASSKYKKLSVRKKEIARTIANDCVKRAETYGDNVVVAMESLTKNNKV |
| | | MSGRGKRDPGWHNLGQAKVENRWFIQAISSAFEDKATHHGTPVLKVNP |
| | | AYTSQTCPSCGHCSKDNRSSKDRTIFVCKSCGEKFNADLDVATYNIAHV |
| | | AFSGKKLSPPSEKSSATKKPRSARKSKKSRKS |
| CasΦ.47 | 91 | SPIEKLLNGLLVKITFGNDWIICDARGLLDNVQKGIIHKSYFTNKSSLVDL |
| | | IDLFTCNPIVNYKNNVVTFCYKEGVVDVKSFTPIKSGPKTQENLIKKLKY |
| | | SRFQNEKDACVLGVGVDVGVTNPFAINGFKMPVDESSEWVMLNEPLFTI |
| | | ETSQAFREEIMAYQQRTDEMNDQFNQQSIDLLPPEYKVEFDNLPEDINEV |
| | | AKYNLLHTLNIPNNFLWDKMSNTTQFISDYLIQIGRGTETEKTITTKKGK |
| | | EKILTIRDVNWFNTFKPKISEETGKARTEIKRDLQKNSDQFQKLAKSREQ |
| | | SCRTWVNNVTEEAKIKSGCPLIIFVIEALVKDNRVFSGKGHRAIGWHNFG |
| | | KQKNERRWWVQAIHKAFQEQGVNHGYPVILCPPQYTSQTCPKCNHVDR |
| | | DNRSGEKFKCLKYGWIGNADLDVGAYNIARVAITGKALSKPLEQKKIKK |
| | | AKNKT |
| CasΦ.48 | 92 | LLDNVQKGIIHKSYFTNKSSLVDLIDLFTCNPIVNYKNNVVTFCYKEGVV |
| | | DVKSFTPIKSGPKTQENLIKKLKYSRFQNEKDACVLGVGVDVGVTNPFAI |
| | | NGFKMPVDESSEWVMLNEPLFTIETSQAFREEIMAYQQRTDEMNDQFN |
| | | QQSIDLLPPEYKVEFDNLPEDINEVAKYNLLHTLNIPNNFLWDKMSNTTQ |
| | | FISDYLIQIGRGTETEKTITTKKGKEKILTIRDVNWFNTFKPKISEETGKAR |
| | | TEIKRDLQKNSDQFQKLAKSREQSCRTWVNNVTEEAKIKSGCPLIIFVIEA |
| | | LVKDNRVFSGKGHRAIGWHNFGKQKNERRWWVQAIHKAFQEQGVNH |
| | | GYPVILCPPQYTSQTCPKCNHVDRDNRSGEKFKCLKYGWIGNADLDVG |
| | | AYNIARVAITGKALSKPLEQKKIKKAKNKT |
| CasΦ.49 | 93 | MIKPTVSQFLTPGFKLIRNHSRTAGLKLKNEGEEACKKFVRENEIPKDEC |
| | | PNFQGGPAIANIIAKSREFTEWEIYQSSLAIQEVIFTLPKDKLPEPILKEEW |
| | | RAQWLSEHGLDTVPYKEAAGLNLIIKNAVNTYKGVQVKVDNKNKNNL |
| | | AKINRKNEIAKLNGEQEISFEEIKAFDDKGYLLQKPSPNKSIYCYQSVSPK |
| | | PFITSKYHNVNLPEEYIGYYRKSNEPIVSPYQFDRLRIPIGEPGYVPKWQY |
| | | TFLSKKENKRRKLSKRIKNVSPILGIICIKKDWCVFDMRGLLRTNHWKKY |
| | | HKPTDSINDLFDYFTGDPVIDTKANVVRFRYKMENGIVNYKPVREKKGK |
| | | ELLENICDQNGSCKLATVDVGQNNPVAIGLFELKKVNGELTKTLISRHPT |
| | | PIDFCNKITAYRERYDKLESSIKLDAIKQLTSEQKIEVDNYNNNFTPQNTK |
| | | QIVCSKLNINPNDLPWDKMISGTHFISEKAQVSNKSEIYFTSTDKGKTKD |
| | | VMKSDYKWFQDYKPKLSKEVRDALSDIEWRLRRESLEFNKLSKSREQD |
| | | ARQLANWISSMCDVIGIENLVKKNNFFGGSGKREPGWDNFYKPKKENR |
| | | WWINAIHKALTELSQNKGKRVILLPAMRTSITCPKCKYCDSKNRNGEKF |
| | | NCLKCGIELNADIDVATENLATVAITAQSMPKPTCERSGDAKKPVRARK |
| | | AKAPEFHDKLAPSYTVVLREAVKRPAATKKAGQAKKKKEF |
| | | (Underlined sequence is Nuclear Localization Signal; SEQ ID NO: 1584) |
| CasΦ.12 | 94 | SNAPKKKRKVGIHGVPAAMIKPTVSQFLTPGFKLIRNHSRTAGLKLKNE |
| with NLS | | GEEACKKFVRENEIPKDECPNFQGGPAIANIIAKSREFTEWEIYQSSLAIQE |
| Signals | | VIFTLPKDKLPEPILKEEWRAQWLSEHGLDTVPYKEAAGLNLIIKNAVNT |
| | | YKGVQVKVDNKNKNNLAKINRKNEIAKLNGEQEISFEEIKAFDDKGYLL |
| | | QKPSPNKSIYCYQSVSPKPFITSKYHNVNLPEEYIGYYRKSNEPIVSPYQF |
| | | DRLRIPIGEPGYVPKWQYTFLSKKENKRRKLSKRIKNVSPILGIICIKKDW |
| | | CVFDMRGLLRTNHWKKYHKPTDSINDLFDYFTGDPVIDTKANVVRFRY |
| | | KMENGIVNYKPVREKKGKELLENICDQNGSCKLATVDVGQNNPVAIGL |
| | | FELKKVNGELTKTLISRHPTPIDFCNKITAYRERYDKLESSIKLDAIKQLTS |
| | | EQKIEVDNYNNNFTPQNTKQIVCSKLNINPNDLPWDKMISGTHFISEKAQ |
| | | VSNKSEIYFTSTDKGKTKDVMKSDYKWFQDYKPKLSKEVRDALSDIEW |
| | | RLRRESLEFNKLSKSREQDARQLANWISSMCDVIGIENLVKKNNFFGGSG |
| | | KREPGWDNFYKPKKENRWWINAIHKALTELSQNKGKRVILLPAMRTSIT |
| | | CPKCKYCDSKNRNGEKFNCLKCGIELNADIDVATENLATVAITAQSMPK |
| | | PTCERSGDAKKPVRARKAKAPEFHDKLAPSYTVVLREAVKRPAATKKA |
| | | GQAKKKKEF |
| | | (Underlined sequences Nuclear Localization Signals; SEQ ID NO: 1584) |
| CasM. | 95 | MIKNPSNRHSLPKVIISEVDHEKILEFKIKYEKLARLDRFEVKAMHYEGK |
| 1584 | | EIVFDEVLVNGGLIEVEYQDDNKTLFVKVGEKSYSIRGKKVGGKQRLLE |
| | | DRVSKTKVQLELSDGVVDNKGNLRKSRTERELIVADNIKLYSQIVGREV |
| | | TTTKEIYLVKRFLAYRSDLLFYYSFVDNFFKVAGNEKELWKINFDDATS |
| | | AQFMGYIPFMVNDNLKNDNAYLKDYVRNDVQIKDDLKKVQTIFSALRH |
| | | TLLHFNYEFFEKLFNGEDVGFDFDIGFLNLLIENIDKLNIDAKKEFIDNEKI |
| | | RLFGENLSLAKVYRLYSDICVNRVGFNKFINSMLIKDGVENQVLKAEFN |
| | | RKFGGNAYTIDIHSNQEYKRIYNEHKKLVIKVSTLKDGQAIRRGNKKISE |
| | | LKEQMKSMTKKNSLARLECKMRLAFGFLYGEYNNYKAFKNNFDTNIKN |
| | | SQFDVNDVEKSKAYFLSTYERRKPRTREKLEKVAKDIESLELKTVIANDT |
| | | LLKFILLMFVFMPQELKGDFLGFVKKYYHDVHSIDDDTKEQEEDVVEA |
| | | MSTSLKLKILGRNIRSLTLFKYALSSQVNYNSTDNIFYVEGNRYGKIYKK |
| | | LGISHNQEEFDKTLVVPLLRYYSSLFKLMNDFEIYSLAKANPTAVSLQEL |
| | | VDDETSPYKQGNYFNFNKMLRDIYGLTSDEIKSGQVVFMRNKIAHFDTE |
| | | VLLSKPLLGQTKMNLQRKDIVSFIEARGDIKELLGYDAINDFRMKVIHLR |
| | | TKMRVYSDKLQTMMDLLRNAKTPNDFYNVYKVKGVESINKHLLEVLA |
| | | QTAEERTVEKQIRDGNEKYDL |
| CasM. | 96 | MLKHKRKNKNSLARVVLSNYDSNNIYEIKIKYEKLAKLDKINIIEMDYD |
| 1730 | | ADNNVMFKKVLFNNKEIDLSHKDKTKINIELDNKKYNISAKKQIGKTHL |
| | | VVRDKQTSKISRIKKIQDTYYRGKDVFILDNNIEILDKKQTKDKFIVTLND |
| | | ITNDKTTSTEAELIDDTKDIFKKISAKKDLKSSDIYKIKRFISIRSNFSFYYT |
| | | FVDNYFKIFHAKKDKNKEELYKIKFKDEINIKPYLENILDNMKNKNGILY |
| | | DYADDREKVLNDLKNIQYVFTEFRHKLAHFDYNFLDNFFSNSVTDQYK |
| | | QKVNEIKLLDILLDNIDSLNVVPKQNYIEDETISVFDAKDIKLKRLYTYYI |
| | | KLTINYPGFKKLINSFFIQDGIENQELKEYINNKEKDTQVLKELDNKAYY |
| | | MDISQYRKYKNIYNKHKELVSEKELSSDGQKINSLNQKINKLKIEMKNIT |
| | | KPNALNRLIYRLRVAFGFIYKEYATINNFNKSFLQDTKIKRFENISQQDIK |
| | | NYLDISYQDKGKFFVKSKKTFKNKTTIKYTFEDLDLTLNEIITQDDIFVKV |
| | | IFLFSIFMPKELNGDFFGFINMYYHKMKNISYDTKDIDMLDTISQNMKLKI |
| | | LEQNIKKTYVFKYYLDLDSSIYSKLVQNIKITEDIDSKKYLYAKIFKYYQH |
| | | LYKLISDVEIYLLYKYNSKENLSITIDKDELKHRGYYNFQSLLIKNNINKD |
| | | DAYWSIVNMRNNLSHQNIDELVGHFCKGCLRKSTTDIAELWLRKDILTIT |
| | | NEIINKIESFKDIKITLGYDCVNDFTQKVKQYKQKLKASNERLAKKIEEK |
| | | QNQVVDEKNKEELEKKILNMKNIQKINRYILDIL |
| CasM. | 97 | MSQLKNPSNKNSLPRIIISDFNEIKINEIKIKYHKLDRLDKIIVKEMEIINNKI |
| 1816 | | FFKKILFNNQIKDINSENIELENYILAGEVKPSNTKIILNRDGKEKSFIVYD |
| | | GFTFKYKPNDKRISETKTNAKYILTIKDKTRHRESSTQRDILKSSIIETYKQ |
| | | ISGFENITSKDIYTIKRYIDFKNEMMFYYTFIDDFFFPITGKNKQDKKNNF |
| | | YNYKIKENAKKFISLINYRINDDFKNKNGILYDYLSNKEEIIINDFIHIQTIL |
| | | KDVRHAIAHFNFDFIQKLFDNEQAFNSKFDGIEILNILFNQKQEKYFEAQT |
| | | NYIEEETIKILDEKELSFKKLHSFYSQICQKKPAFNKLINSFIIQDGIENKEL |
| | | KDYISQKYNSKFDYYLDIHTCKIYKDIYNQHKKFVADKQFLENQKTDGQ |
| | | KIKKLNDQINQLKTKMNNLTKKNSLKRLEIKFRLAFGFIFTEYQTFKNFN |
| | | ERFIEDIKANKYSTKIELLDYGKIKEYISITHEEKRFFNYKTFNKKTNKNIN |
| | | KTIFQSLEKETFENLVKNDNLIKMMFLFQLLLPRELKGEFLGFILKIYHDL |
| | | KNIDNDTKPDEKSLSELNISTALKLKILVKNIRQINLFNYTISNNTKYEEKE |
| | | KRFYEEGNQWKDIYKKLYISHDFDIFDIHLIIPIIKYNINLYKLIGDFEVYL |
| | | LLKYLERNTNYKTLDKLIEAEELKYKGYYNFTTLLSKAINIALNDKEYH |
| | | NITHLRNNTSHQDIQNIISSFKNNKLLEQRENIIELISKESLKKKLHFDPIND |
| | | FTMKTLQLLKSLEVHSDKSEKIENLLKKEPLLPNDVYLLYKLKGIEFIKK |
| | | ELISNIGITKYEEKIQEKIAKGVEK |
| CasM. | 98 | ELCKIDFTDARSSSLIEYFKFAINDNLKNDRGYLKAYVNDVEQIRADLKK |
| 1862939 | | VGGKQRNLEDRVSRTKVQLTLTNHIEDREGKQRVSRTERELIVPQNIKLY |
| | | SQIVGREVKTTKEIYLIKRFLEYRSDLLFYYGFVDNFFKVEGNKKELCKI |
| | | DFTDARSSSLIEYFKFAINDNLKNDRGYLKAYVNDVEQIRTDLQKVKTIF |
| | | SKLRHALMHFDYDFFEKLFNGEEVGFDFDIKFLNIMIDKVEKLNIETKKE |
| | | FIEDEVITLFGERLSLKKLYGLFSHIAINRVAFNKFINSFLIKDGIENRALK |
| | | DFFNDEKGSQAYEIDIHSNAEYKALYVQHKKLVMATSAMSDGNEIAKK |
| | | NQEISELKEKMNAITKANSLARLEYKLRLAFGFIYTEYGDYTAFKNSFDR |
| | | DVKSAKYKELSVERLKAYYLATFKASKPQSHEKLEEVAKKIDRLSLKQL |
| | | IENETLLKFVLLLFTFMPQELKGEFLGFIKKYYHDKKHIEQDTKEKEEER |
| | | EGLSTGLKLKVLEKNIRSLSILKHALSFQVKYNKKDKNFYEEGNLHGKF |
| | | YKKLAISHNQEEFNKSVYAPLFRYYVALYKLINDFEIYSLAQHIVNNETL |
| | | ADQVGKAQFRQRGYFNFRKLVNCTYATAQNSSYNVLIFMRNDISHLSYE |
| | | PLFNCPLEEKASYKQKIRGREKIISVKPLSESRAEIVRFIASQTDMKKLLG |
| | | YDAVNDFNMKMVQLRRRLSVYANKQETIEKMINKAKTPNDFYNLYKL |
| | | KGIECINQHLLKVIGVTEAEKRIEKQIEEGNEKY |
| CasM. | 99 | MLKKPSNRYALPKVILSTVDHEKILEFKVKYEKLARLDRLVVERMHFDG |
| 1862895 | | ESVVFDEVIANSGDLEIAYQDDHRKLLIQAAGKSYTITGKKVGGKKRKL |
| | | EERISRAKIQLTLTDGQEDQHRRIRATVTEKALLEPKEDRDIYSKISDRKI |
| | | KTSKEIYLVKRFLSYRSDLLFYYFFVDNFFKVGNNKQELWKIKFQNQPEL |
| | | IEYFRFIINDRFKNAKNDKFDNYLKNDKAIQEDLEKIQKVFEKLRHALMH |
| | | YDYGFFEKLFGGEDQGFDLDIAFLDNFVKKIDKLNIDTKKEFVDDEKIKI |
| | | FGEDLNLADLYKLYASISINRVGFNRVVNEMIIKDGIEKSELKRAFEKKL |
| | | DKTYALDIHSDPSYKKLYNEHKRLVTEVSTYTDGNKIKEGNQKIAKLKY |
| | | EMKEITKKNALVRLECKMRLAFGLIYGRYDTHEAFKNGFDTDLKRGEF |
| | | AQIGSEEAIGYFNTTFEKSKPKSKEEIKKIARQIDNLSLSTLIEDDPLMKFI |
| | | VLMFLFVPRELKGEFLGFWRKYYHDIHSIDSDAKSDEMPDEVSLSLKLKI |
| | | LTRNIRRLNLFEYSLSEKIKYSPKNTQFYTDKSPYQKVYKRLKISHNKEEF |
| | | DKTLLVPLFRYYSILFKLINDFEIYSLAKANPDASSLSELTKTKHGFRGHY |
| | | NFTTLMMDAHKVSQGDSKKHFGIRGEIAHINTKDLIYDPLFRKSKMAQQ |
| | | RNDVIDFVLKYEKEIKAVLGYDAINDFRMKVVQLRTKLKVYSDKTQTIE |
| | | KLLNEVEAPDDFYVLYKVKGVEAINKYLLEIVSVTQAEEEIERKIITGNK |
| | | RYNT |
| CasM. | 100 | MLKHKRKNKNSLARVVLSNYDSNNIYEIKIKYEKLAKLDKINIIEMDYD |
| 1862903 | | ADNNVMFKKVLFNNKEIDLSHKDKTKINIELDNKKYNISAKKQIGKTHL |
| | | VVRNKQTSKISRIKKIQDTYYRGKDVFILDNNIEILDKKQTKDKFIVTLND |
| | | ITNNKTTSTEAELIDDTKDIFKKISAKKDLKSSDIYKIKRFISIRSNFSFYYT |
| | | FVDNYFKIFHAKKDKNKEELYKIKFKDEINIKPYLENILDNMKNKNGILY |
| | | NYANDRKKVLNDLRNIQYVFKEFRHKLAHFDYNFLDNFFSNSVEEKYK |
| | | QKVNEIKLLDILLDNIDSLNVVPKQNYIEDETISVFDAKDIKLKRLYTYYI |
| | | KLTINYPGFKKLINSFFIQDGIENQELKEYINNKEKDTQVLKELDNKAYY |
| | | MDISQYRKYKNIYNKHKELVSEKELSSDGKKINSLNQKINKLKIDMKNIT |
| | | KPNALNRLIYRLRVAFGFIYKEYATINNFNKSFLQDTKTKRFENISQQDIK |
| | | SYLDISYQDKGKFFVKSKKTFKNKTTVKYTFEDLDLTLNEIITQDDIFVK |
| | | VIFLFSIFMPKELNGDFFGFINMYYHKMKNISYDTKDIDMLDTISQNMKL |
| | | KILEQNIKKTYVFKYYLDLDSSIYSKLVQNIKITEDIDSKKYLYAKIFKYY |
| | | QHLYKLISDVEIYLLYKYNSKENLSITIDKDELKHRGYYNFQSLLIKNNIN |
| | | KDDAYWSIVNMRNNLSHQNIDELVGHFCKGCLRKSTTDIAELWLRKDIL |
| | | TITNEIINKIESFKDIKITLGYDCVNDFTQKVKQYKQKLKASNERLAKKIE |
| | | EKQNQVVDEKNKEELEKNILNMKNIQKINRYILDIL |
| CasM. | 101 | MIKKPSNRHALPKVIISKVDNQNILEFKIKYKKLSRLDRVEIKTMHYDDR |
| 1862909 | | AIVFDEVIINGGLIDVEYRDNHKTIFVKVGDKSYSISGQKVGGKERLLEN |
| | | RISQTKVQLELKDEATNRVSKTERELIVDDNIKLYSQIVGRDVKTTKDIY |
| | | LIKRFLGYRSDLLFYYGFVNNFFHVANNRPEFWKIDFNDNRNSKLIEYFIF |
| | | TINDHLKNDENYLKDYISDRGQIVDDLENIKHIFSALRHGLMHFDYDFFE |
| | | ALFNGEDIDIKMDNQGNTQPLSSLNIKFLDIMIDKLDKLNIDTKKEFIDAE |
| | | KITIFGEELSLAKLYRFYAHTAINRVAFNKLINSFIIENGVENQSLKEYFNQ |
| | | QAGGIAYEIDIHQNREYKNLYNEHKKLVSRVLSISDGQEIATLNQKIVEL |
| | | KEQMKQITKINSIKRLEYKLRLAFGFIYTEYKNYEEFKNSFDTDIKNGRFT |
| | | PKDEDGNKRAFDSRELEHLKGYYKATLQTQKPQTDEKMEEVSKRVDRL |
| | | SLKSLIGDDTLLKFILLMFTFMPQELKGEFLGFIKKYYHDTKHIDQDTISD |
| | | SDDTIEEGLSIGLKLKILDKNIRSLSILKHSLSFQTKYNKKDRSYYEDGNIH |
| | | GKFFKKLGISHNQEEFNKSVYAPLFRYYSALYKLINDFEIYTLSLHIVGNE |
| | | TLSDQVNKPQFLSGRYFNFRKLLTQSYNISNNSTHSVIFNAVINMRNDISH |
| | | LSYEPLLDCPLNGKKSYKRKIRNQFRTINIKPLVESRKMIIDFITLQTDMQ |
| | | KVLGCDAVNDFTMKIVQLRTRLKAYANKEQTIEKMITEAKTPNDFYNIY |
| | | KVKGVEAINKYLLEVIGETQVEKEIREEIERGNIANS |
| CasM. | 102 | MVKNPANRHALPKVIISEVDNNNILEFKIKYEKLARLDKVEVKSMHFDN |
| 1862917 | | NKQVVFDEVVINGGLIEPTYEDKHKKLVVTAGEKSYSIVGQKVGGKPRL |
| | | LEDRVSKTKVQLELTNYVEDKEGKKRVSKTERELIVADNIELYSQIVGRE |
| | | VKTTKEIYLIKRFLEYRSDLLFYYGFVDNFFKVAGNGKELWKIDFTNSDS |
| | | LHLIEYFKFSINDNLKNDENYLKNYVSDNTKIENDLVKCQNNFNSLRHA |
| | | LMHFDYDFFEKLFNGEDVGFDFDIEFLNIMIDKVDKLNIDTKKEFIDDEE |
| | | VTLFGEALSLKKLYGLFSHIAINRVAFNKLINSFIIEDGIENKELKDFFNNK |
| | | KESQAYEIDIHSNAEYKALYVQHKKLVMATSAMTDGDEIAKKNQEISDL |
| | | KEKMKVITKENSLARLEHKLRLAFGFIYTEYKDYKTFKKHFDQDIKGAK |
| | | YKGLNVEKLKEYYETTLKNSKPKTDEKLEDVAKKIDKLSLKELIDDDTL |
| | | LKFVLLLFIFMPQELKGDFLGFIKKYYHDKKHIDQDTKDKDTEIEELSTG |
| | | LKLKVLDKNIRSLSILKHSFSFQVKYNRKDKNFYEDGNLHGKFYKKLSIS |
| | | HNQEEFNKSVYAPLFRYYSALYKLINDFEIYALAQHVENHETLADQVNK |
| | | SQFIQKSYFNFRKLLDNTDSISQSSSYNTLIVMRNDISHLSYEPLFNYPLDE |
| | | RKSYKKKTQKGVKTFHVELLYISRAKIIELISLQTDMKKLLGYDAVNDF |
| | | NMKVVHLRKRLSVYANKEESIRKMQADAKTPNDFYNIYKVKGVESINQ |
| | | HLLKVIGVTEAEKSIEKQINEGNKKHNT |
| CasM. | 103 | MIKNPSNRYALPKVIISKIDNQNILEFKIKYKKLSKLDIVKVKSMHYDDR |
| 1862921 | | AIIFDEVIVNDGLIDVEYRDNHKTIFVKVGNKSYSISGQKVGGKERLLEN |
| | | RVSKTKVQLELKDKATNRVSKTERELIVDDNIKIYSQIVGRDVKTTKDIY |
| | | LIKRFLAYRSDLLFYYGFVNNFFHVANNRSEFWKIDFNDSNNSKLIEYFK |
| | | FTINDHLKNDENYLKDYISDNEKLKNDLIKVKNSFEKIRHALMHFDYDFF |
| | | VKLFNGEDVGLELDIEFLDIMIDKLDKLNIDTKKEFIDDEKITIFGEELSLA |
| | | KLYRFYAHTAINRVAFNKLINSFIIENGVENQSLKEYFNQQAGGIAYEIDI |
| | | HQNREYKNLYNEHKKLVSRVLSISDGQEIAILNQKIAKLKDQMKQITKA |
| | | NSIKRLEYKLRLALGFIYTEYENYEEFKNNFDTDIKNGRFTPKDNDGNKR |
| | | AFDSRELEQLKGYYEATIQTQKPKTDEKIEEVSKKIDRLSLKSLIADDILL |
| | | KFILLMFTFMPQELKGEFLGFIKKYYHDTKHIDQDTISDSDDTIETLSIGLK |
| | | LKILDKNIRSLSILKHSLSFQTKYNKKDRNYYEDGNIHGKFFKKLGISHN |
| | | QEEFNKSVYAPLFRYYSALYKLINDFEIYTLSLHIVGSETLTDQVNKSQFL |
| | | SGRYFNFRKLLTQSYHINNNSTHSTIFNAVINMRNDISHLSYEPLFDCPLN |
| | | GKKSYKRKIRNQFKTINIKPLVESRKIIIDFITLQTDMQKVLGYDAVNDFT |
| | | MKIVQLRTRLKAYANKEQTIQKMITEAKTPNDFYNIYKVQGVEEINKYL |
| | | LEVIGETQAEKEIREKIERGNIANF |
| CasM. | 104 | MTKKPSNRNSLPKVIINKVDESSILEFKIKYEKLARLDRFEVRSMRYDGD |
| 1862947 | | GRIIFDEVVANAGLLDVDYEDDNRTIVVKIENKAYNIYGKKVGGEKRLN |
| | | GKISKAKVQLILTDSIRKNANDTHRHSLTERELINKNEVDLYSKIAEREIS |
| | | TTKDIYLVKRFLAYRSDLLLYYAFINHYVRVNGNKKEFWKTEIDDKIIDY |
| | | FIYTINDTLKNKEGYLEKYIVDRDQIKKDLEKIKQIFSHLRHKLMHYDFR |
| | | FFTDLFDGKDVDIKVDNSIQKISELLDIEFLNIVIDKLEKLNIDAKKEFIDD |
| | | EKITLFGQEIELKKLYSLYAHTSINRVAFNKLINSFLIKDGVENKELKEYF |
| | | NAHNQGKESYYIDIHQNQEYKKLYIEHKNLVAKLSATTDGKEIAKINRE |
| | | LADKKEQMKQITKANSLKRLEYKLRLAFGFIYTEYKDYERFKNSFDTDT |
| | | KKKKFDAIDNAKIIEYFEATNKAKKIEKLEEILKGIDKLSLKTLIQDDILLK |
| | | FLLLFFTFLPQEIKGEFLGFIKKYYHDITSLDEDTKDKDDEITELPRSLKLK |
| | | IFSKNIRKLSILKHSLSYQIKYNKKESSYYEAGNVFNKMFKKQAISHNLEE |
| | | FGKSIYLPMLKYYSALYKLINDFEIYALYKDMDTSETLSQQVDKQEYKR |
| | | NEYFNFETLLRKKFGNDIEKVLVTYRNKIAHLDFNFLYDKPINKFISLYKS |
| | | REKIVNYIKNHDIQAVLKYDAVNDFVMKVIQLRTKLKVYADKEQTIESM |
| | | IQNTQNPNGFYNIYKVKAVENINRHLLKVIGYTESEKAVEEKIRAGNTSK |
| | | S |
| CasM. | 105 | MEKIKKPSNRNSIPSIIISDYDANKIKEIKVKYLKLARLDKITIQDMEIVDNI |
| 1422 | | VEFKKILLNGVEHTIIDNQKIEFDNYEITGCIKPSNKRRDGRISQAKYVVTI |
| | | TDKYLRENEKEKRFKSTERELPNNTLLSRYKQISGFDTLTSKDIYKIKRYI |
| | | DFKNEMLFYFQFIEEFFNPLLPKGKNFYDLNIEQNKDKVAKFIVYRLNDD |
| | | FKNKSLNSYITDTCMIINDFKKIQKILSDFRHALAHFDFDFIQKFFDDQLD |
| | | KNKFDINTISLIETLLDQKEEKNYQEKNNYIDDNDILTIFDEKGSKFSKLH |
| | | NFYTKISQKKPAFNKLINSFLSQDGVPNEEFKSYLVTKKLDFFEDIHSNKE |
| | | YKKIYIQHKNLVIKKQKEESQEKPDGQKLKNYNDELQKLKDEMNTITKQ |
| | | NSLNRLEVKLRLAFGFIANEYNYNFKNFNDEFTNDVKNEQKIKAFKNSS |
| | | NEKLKEYFESTFIEKRFFHFSVNFFNKKTKKEETKQKNIFNSIENETLEEL |
| | | VKESPLLQIITLLYLFIPRELQGEFVGFILKIYHHTKNITSDTKEDEISIEDA |
| | | QNSFSLKFKILAKNLRGLQLFHYSLSHNTLYNNKQCFFYEKGNRWQSVY |
| | | KSFQISHNQDEFDIHLVIPVIKYYINLNKLMGDFEIYALLKYADKNSITVK |
| | | LSDITSRDDLKYNGHYNFATLLFKTFGIDTNYKQNKVSIQNIKKTRNNLA |
| | | HQNIENMLKAFENSEIFAQREEIVNYLQTEHRMQEVLHYNPINDFTMKT |
| | | VQYLKSLSVHSQKEGKIADIHKKESLVPNDYYLIYKLKAIELLKQKVIEVI |
| | | GESEDEKKIKNAIAKEEQIKKGNN |
| CasM. | 106 | MMTKKPANRHALPKVIISEVDNTNILEFKIKYEKLARLDRVEVKAMHYE |
| 1740 | | DGRIIFDEVVVNGGLIEVEYQDDHKTLFVQVGEKSYSISGQKVGGKQRL |
| | | LEDRVSKTKVQLELSDGSSERVSRTERELIVADNIKLYSQIVGHEVKTTK |
| | | EIYLAKRFLGYRSDLLFYYGFVDNFFRESKNLKYGKQPVELWEDKFQVN |
| | | DKLTAYTKFMFNDDLQNSESYLKEYVKDNHKIKNDLESARDIFATFRHN |
| | | LMHFNYSFFTRLFNGEDVKIKNLQTKKFESLSDVLRNVEFLNKVIQSIDK |
| | | LNIDTRKEFIDKEKITLFNEELDLQQLYGFFAYTAINRVAFNKLINSFIIKD |
| | | GIENEQLKEYFNQRVDGTAYEIDIHQNREYKELYKKHKNLVSKVSTLSD |
| | | GKEIARGNTEISVLKEQMNKITKANSLKRLEHKLRLAFGFIYTEYGSYKA |
| | | FVSRFNEDTKRKKIKNVEFEKIGVEKQKEYYESTFTSNNKDKLGELIQEY |
| | | EKLSLNDLIENDTFLKVILLLFIFMPKEVKGDFLGFIKKYYHDTKHIEEDT |
| | | KEKDEGFTNTLPIGLKLKIVERNIAKLSVLKHSLSLKVKYNRGQYEEDNT |
| | | YRKVFKKLNISHNQEEFHKSMFSPLLRYYASLYKLINDFEIYTLSHYITDK |
| | | YSTLNKVIASEQFHYRYGWNREEKKGELVKTDNYTFSTLLSKKYGHKN |
| | | SQEISEMRNKISHFDEKILFKFPLEEVSSVPKGKGKYKKDEPIKSLKEKRE |
| | | EIVSLMEKQTDMQKVLGYDAINDFRMKTVQFQTKLKVYSNKEETIKKM |
| | | IVEAKTPNDYYNIYKVKGVEGINEHLLNVIGETEAEKSIQEQIAEGNKVN |
| | | V |
| Cas14a. | 107 | MAGKKKDKDVINKTLSVRIIRPRYSDDIEKEISDEKAKRKQDGKTGELDR |
| 280852 | | AFFSELKSRNPDIITNDELFPLFTEIQKNLTEIYNKSISLLYMKLIVEEEGGS |
| | | TASALSAGPYKECKARFNSYISLGLRQKIQSNFRRKELKGFQVSLPTAKS |
| | | DRFPIPFCHQVENGKGGFKVYETGDDFIFEVPLIKYTATNKKSTSGKNYT |
| | | KVQLNNPPVPMNVPLLLSTMRRRQTKKGMQWNKDEGTNAELRRVMSG |
| | | EYKVSYAEIIRRTRFGKHDDWFVNFSIKFKNKTDELNQNVRGGIDIGVSN |
| | | PLVCAVTNGLDRYIVANNDIMAFNERAMARRRTLLRKNRFKRSGHGAK |
| | | NKLEPITVLTEKNERFRKSILQRWAREVAEFFKRTSASVVNMEDLSGITE |
| | | REDFFSTKLRTTWNYRLMQTTIENKLKEYGIAVNYISPKYTSQTCHSCGK |
| | | RNDYFTFSYRSENNYPPFECKECNKVKCNADFNAAKNIALKVVL |
| | 108 | MRISKTLSLRIVRPFYTPEVEAGIKAEKDKREAQGQTRSLDAKFFNELKK |
| | | KHSEIILSSEFYSLLSEVQRQLTSIYNHAMSNLYHKIIVEGEKTSTSKALSN |
| | | IGYDECKAIFPSYMALGLRQKIQSNFRRRDLKNFRMAVPTAKSDKFPIPIY |
| | | RQVDGSKGGFKISENDGKDFIVELPLVDYVAEEVKTAKGRFTKINISKPP |
| | | KIKNIPVILSTLRRRQSGQWFSDDGTNAEIRRVISGEYKVSWIEIVRRTRF |
| | | GKHDDWFVNMVIKYDKPEEGLDSKVVGGIDVGVSSPLVCALNNSLDRY |
| | | FVKSSDIIAFNKRAMARRRTLLRQNKYKRSGHGSKNKLEPITVLTEKNER |
| | | FKKSIMQRWAKEVAEFFRGKGASVVRMEELSGLKEKDNFFSSYLRMYW |
| | | NYGQLQQIIENKLKEYGIKVNYVSPKDTSKKCHSCTHINEFFTFEYRQKN |
| | | NFPLFKCEKCGVECSADYNAAKNMAIA |
| Cas14 | 109 | MKDYIRKTLSLRILRPYYGEEIEKEIAAAKKKSQAEGGDGALDNKFWDR |
| ortholog 3 | | LKAEHPEIISSREFYDLLDAIQRETTLYYNRAISKLYHSLIVEREQVSTAK |
| | | ALSAGPYHEFREKFNAYISLGLREKIQSNFRRKELARYQVALPTAKSDTF |
| | | PIPIYKGFDKNGKGGFKVREIENGDFVIDLPLMAYHRVGGKAGREYIELD |
| | | RPPAVLNVPVILSTSRRRANKTWFRDEGTDAEIRRVMAGEYKVSWVEIL |
| | | QRKRFGKPYGGWYVNFTIKYQPRDYGLDPKVKGGIDIGLSSPLVCAVTN |
| | | SLARLTIRDNDLVAFNRKAMARRRTLLRQNRYKRSGHGSANKLKPIEAL |
| | | TEKNELYRKAIMRRWAREAADFFRQHRAATVNMEDLTGIKDREDYFSQ |
| | | MLRCYWNYSQLQTMLENKLKEYGIAVKYIEPKDTSKTCHSCGHVNEYF |
| | | DFNYRSAHKFPMFKCEKCGVECGADYNAARNIAQA |
| Cas14 | 110 | VKISKTLSLRIIRPYYTPEVESAIKAEKDKREAQGQTRNLDAKFFNELKK |
| ortholog 4 | | KHPQIILSGEFYSLLFEMQRQLTSIYNRAMSSLYHKIIVEGEKTSTSKALS |
| | | DIGYDECKSVFPSYIALGLRQKIQSNFRRKELKGFRMAVPTAKSDKFPIPI |
| | | YKQVDDGKGGFKISENKEGDFIVELPLVEYTAEDVKTAKGKFTKINISKP |
| | | PKIKNIPVILSTLRRKQSGQWFSDEGTNAEIRRVISGEYKVSWIEVVRRTR |
| | | FGKHDDWFLNIVIKYDKTEDGLDPEVVGGIDVGVSTPLVCAVNNSLDRY |
| | | FVKSSDIIAFKKRAMARRRTLLRQNRFKRSGHGSKSKLEPITILTEKNERF |
| | | KKSIMQRWAKEVAEFFKGERASVVQMEELSGLKEKDNFFGSYLRMYW |
| | | NYGQLQQIIENKLKEYGIKVNYVSPKDTSKKCHSCGYINEFFTFEFRQKN |
| | | NFPLFKCKKCGVECNADYNAAKNIAIA |
| Cas14 | 111 | VPITKTISLRILRPYYPPEIEAKIKAEKEKRKENGDTGSLNSSYYRELKKEY |
| ortholog 5 | | PSIIINDEFFPLLSEMQRNITSIYNRTISHLYHRLIIKKESISTAKALSEGPYR |
| | | DFKSTFNSYIALGLRQKVQSNFRKKDLMAFKIALPTAKSDKFPIPIYMQT |
| | | NFKIKESPDSDFIIELPLVEYIAKETKGKNKMFTKVEILSPPKVKNIPVILST |
| | | RRRKESGQWFSDEGTNAEIRRIISGEYKVSWIEIVKRTRFGKHDWFVNM |
| | | VISFEESQEGLDPDVIGGIDIGVSKPLICAINNSLDRYIVKGDDIIAFNRRAL |
| | | SRRRSLLRRNRLKRSGHGSRNKLEPITVLTEKNERFKKSIMQRWAKEVA |
| | | EFFKSKRASIVQMEELTGIKEREDFFSKTLRMYWNYGQLQKTVENKLRE |
| | | YGIEVRYASPKDTSRRCHSCGHINDYFTFEFRQQNNFPLFKCMNCGIECS |
| | | ADYNAARNIAIAR |
| Cas14 | 112 | MEVQKTVMKTLSLRILRPLYSQEIEKEIKEEKERRKQAGGTGELDGGFY |
| ortholog 6 | | KKLEKKHSEMFSFDRLNLLLNQLQREIAKVYNHAISELYIATIAQGNKSN |
| | | KHYISSIVYNRAYGYFYNAYIALGICSKVEANFRSNELLTQQSALPTAKS |
| | | DNFPIVLHKQKGAEGEDGGFRISTEGSDLIFEIPIPFYEYNGENRKEPYKW |
| | | VKKGGQKPVLKLILSTFRRQRNKGWAKDEGTDAEIRKVTEGKYQVSQIE |
| | | INRGKKLGEHQKWFANFSIEQPIYERKPNRSIVGGLDVGIRSPLVCAINNS |
| | | FSRYSVDSNDVFKFSKQVFAFRRRLLSKNSLKRKGHGAAHKLEPITEMT |
| | | EKNDKFRKKIIERWAKEVTNFFVKNQVGIVQIEDLSTMKDREDHFFNQY |
| | | LRGFWPYYQMQTLIENKLKEYGIEVKRVQAKYTSQLCSNPNCRYWNNY |
| | | FNFEYRKVNKFPKFKCEKCNLEISADYNAARNLSTPDIEKFVAKATKGIN |
| | | LPEK |
| Cas14 | 113 | MEEAKTVSKTLSLRILRPLYSAEIEKEIKEEKERRKQGGKSGELDSGFYK |
| ortholog 7 | | KLEKKHTQMFGWDKLNLMLSQLQRQIARVFNQSISELYIETVIQGKKSN |
| | | KHYTSKIVYNRAYSVFYNAYLALGITSKVEANFRSTELLMQKSSLPTAKS |
| | | DNFPILLHKQKGVEGEEGGFKISADGNDLIFEIPIPFYEYDSANKKEPFKW |
| | | IKKGGQKPTIKLILSTFRRQRNKGWAKDEGTDAEIRKVIEGKYQVSHIEIN |
| | | RGKKLGDHQKWFVNFTIEQPIYERKLDKNIIGGIDVGIKSPLVCAVNNSF |
| | | ARYSVDSNDVLKFSKQAFAFRRRLLSKNSLKRSGHGSKNKLDPITRMTE |
| | | KNDRFRKKIIERWAKEVTNFFIKNQVGTVQIEDLSTMKDRQDNFFNQYL |
| | | RGFWPYYQMQNLIENKLKEYGIETKRIKARYTSQLCSNPSCRHWNSYFS |
| | | FDHRKTNNFPKFKCEKCALEISADYNAARNISTPDIEKFVAKATKGINLP |
| | | DKNENVILE |
| Cas14a.1 | 114 | MAKNTITKTLKLRIVRPYNSAEVEKIVADEKNNREKIALEKNKDKVKEA |
| | | CSKHLKVAAYCTTQVERNACLFCKARKLDDKFYQKLRGQFPDAVFWQ |
| | | EISEIFRQLQKQAAEIYNQSLIELYYEIFIKGKGIANASSVEHYLSDVCYTR |
| | | AAELFKNAAIASGLRSKIKSNFRLKELKNMKSGLPTTKSDNFPIPLVKQK |
| | | GGQYTGFEISNHNSDFIIKIPFGRWQVKKEIDKYRPWEKFDFEQVQKSPK |
| | | PISLLLSTQRRKRNKGWSKDEGTEAEIKKVMNGDYQTSYIEVKRGSKIGE |
| | | KSAWMLNLSIDVPKIDKGVDPSIIGGIDVGVKSPLVCAINNAFSRYSISDN |
| | | DLFHFNKKMFARRRILLKKNRHKRAGHGAKNKLKPITILTEKSERFRKK |
| | | LIERWACEIADFFIKNKVGTVQMENLESMKRKEDSYFNIRLRGFWPYAE |
| | | MQNKIEFKLKQYGIEIRKVAPNNTSKTCSKCGHLNNYFNFEYRKKNKFP |
| | | HFKCEKCNFKENADYNAALNISNPKLKSTKEEP |
| Cas14 | 115 | MERQKVPQIRKIVRVVPLRILRPKYSDVIENALKKFKEKGDDTNTNDFW |
| ortholog 9 | | RAIRDRDTEFFRKELNFSEDEINQLERDTLFRVGLDNRVLFSYFDFLQEKL |
| | | MKDYNKIISKLFINRQSKSSFENDLTDEEVEELIEKDVTPFYGAYIGKGIK |
| | | SVIKSNLGGKFIKSVKIDRETKKVTKLTAINIGLMGLPVAKSDTFPIKIIKT |
| | | NPDYITFQKSTKENLQKIEDYETGIEYGDLLVQITIPWFKNENKDFSLIKT |
| | | KEAIEYYKLNGVGKKDLLNINLVLTTYHIRKKKSWQIDGSSQSLVREMA |
| | | NGELEEKWKSFFDTFIKKYGDEGKSALVKRRVNKKSRAKGEKGRELNL |
| | | DERIKRLYDSIKAKSFPSEINLIPENYKWKLHFSIEIPPMVNDIDSNLYGGI |
| | | DFGEQNIATLCVKNIEKDDYDFLTIYGNDLLKHAQASYARRRIMRVQDE |
| | | YKARGHGKSRKTKAQEDYSERMQKLRQKITERLVKQISDFFLWRNKFH |
| | | MAVCSLRYEDLNTLYKGESVKAKRMRQFINKQQLFNGIERKLKDYNSEI |
| | | YVNSRYPHYTSRLCSKCGKLNLYFDFLKFRTKNIIIRKNPDGSEIKYMPFF |
| | | ICEFCGWKQAGDKNASANIADKDYQDKLNKEKEFCNIRKPKSKKEDIGE |
| | | ENEEERDYSRRFNRNSFIYNSLKKDNKLNQEKLFDEWKNQLKRKIDGRN |
| | | KFEPKEYKDRFSYLFAYYQEIIKNESES |
| Cas14 | 116 | MVPTELITKTLQLRVIRPLYFEEIEKELAELKEQKEKEFEETNSLLLESKKI |
| ortholog 10 | | DAKSLKKLKRKARSSAAVEFWKIAKEKYPDILTKPEMEFIFSEMQKMMA |
| | | RFYNKSMTNIFIEMNNDEKVNPLSLISKASTEANQVIKCSSISSGLNRKIA |
| | | GSINKTKFKQVRDGLISLPTARTETFPISFYKSTANKDEIPISKINLPSEEEA |
| | | DLTITLPFPFFEIKKEKKGQKAYSYFNIIEKSGRSNNKIDLLLSTHRRQRRK |
| | | GWKEEGGTSAEIRRLMEGEFDKEWEIYLGEAEKSEKAKNDLIKNMTRG |
| | | KLSKDIKEQLEDIQVKYFSDNNVESWNDLSKEQKQELSKLRKKKVEELK |
| | | DWKHVKEILKTRAKIGWVELKRGKRQRDRNKWFVNITITRPPFINKELD |
| | | DTKFGGIDLGVKVPFVCAVHGSPARLIIKENEILQFNKMVSARNRQITKD |
| | | SEQRKGRGKKNKFIKKEIFNERNELFRKKIIERWANQIVKFFEDQKCATV |
| | | QIENLESFDRTSYK |
| Cas14 | 117 | MKSDTKDKKIIIHQTKTLSLRIVKPQSIPMEEFTDLVRYHQMIIFPVYNNG |
| ortholog 11 | | AIDLYKKLFKAKIQKGNEARAIKYFMNKIVYAPIANTVKNSYIALGYSTK |
| | | MQSSFSGKRLWDLRFGEATPPTIKADFPLPFYNQSGFKVSSENGEFIIGIPF |
| | | GQYTKKTVSDIEKKTSFAWDKFTLEDTTKKTLIELLLSTKTRKMNEGWK |
| | | NNEGTEAEIKRVMDGTYQVTSLEILQRDDSWFVNFNIAYDSLKKQPDRD |
| | | KIAGIHMGITRPLTAVIYNNKYRALSIYPNTVMHLTQKQLARIKEQRTNS |
| | | KYATGGHGRNAKVTGTDTLSEAYRQRRKKIIEDWIASIVKFAINNEIGTI |
| | | YLEDISNTNSFFAAREQKLIYLEDISNTNSFLSTYKYPISAISDTLQHKLEE |
| | | KAIQVIRKKAYYVNQICSLCGHYNKGFTYQFRRKNKFPKMKCQGCLEA |
| | | TSTEFNAAANVANPDYEKLLIKHGLLQLKK |
| Cas14 | 118 | MSTITRQVRLSPTPEQSRLLMAHCQQYISTVNVLVAAFDSEVLTGKVSTK |
| ortholog 12 | | DFRAALPSAVKNQALRDAQSVFKRSVELGCLPVLKKPHCQWNNQNWR |
| | | VEGDQLILPICKDGKTQQERFRCAAVALEGKAGILRIKKKRGKWIADLT |
| | | VTQEDAPESSGSAIMGVDLGIKVPAVAHIGGKGTRFFGNGRSQRSMRRR |
| | | FYARRKTLQKAKKLRAVRKSKGKEARWMKTINHQLSRQIVNHAHALG |
| | | VGTIKIEALQGIRKGTTRKSRGAAARKNNRMTNTWSFSQLTLFITYKAQ |
| | | RQGITVEQVDPAYTSQDCPACRARNGAQDRTYVCSECGWRGHRDTVG |
| | | AINISRRAGLSGHRRGATGA |
| Cas14 | 119 | MIAQKTIKIKLNPTKEQIIKLNSIIEEYIKVSNFTAKKIAEIQESFTDSGLTQ |
| ortholog 13 | | GTCSECGKEKTYRKYHLLKKDNKLFCITCYKRKYSQFTLQKVEFQNKTG |
| | | LRNVAKLPKTYYTNAIRFASDTFSGFDEIIKKKQNRLNSIQNRLNFWKEL |
| | | LYNPSNRNEIKIKVVKYAPKTDTREHPHYYSEAEIKGRIKRLEKQLKKFK |
| | | MPKYPEFTSETISLQRELYSWKNPDELKISSITDKNESMNYYGKEYLKRY |
| | | IDLINSQTPQILLEKENNSFYLCFPITKNIEMPKIDDTFEPVGIDWGITRNIA |
| | | VVSILDSKTKKPKFVKFYSAGYILGKRKHYKSLRKHFGQKKRQDKINKL |
| | | GTKEDRFIDSNIHKLAFLIVKEIRNHSNKPIILMENITDNREEAEKSMRQNI |
| | | LLHSVKSRLQNYIAYKALWNNIPTNLVKPEHTSQICNRCGHQDRENRPK |
| | | GSKLFKCVKCNYMSNADFNASINIARKFYIGEYEPFYKDNEKMKSGVNS |
| | | ISM |
| Cas14 | 120 | LKLSEQENITTGVKFKLKLDKETSEGLNDYFDEYGKAINFAIKVIQKELA |
| ortholog 14 | | EDRFAGKVRLDENKKPLLNEDGKKIWDFPNEFCSCGKQVNRYVNGKSL |
| | | CQECYKNKFTEYGIRKRMYSAKGRKAEQDINIKNSTNKISKTHFNYAIRE |
| | | AFILDKSIKKQRKERFRRLREMKKKLQEFIEIRDGNKILCPKIEKQRVERY |
| | | IHPSWINKEKKLEDFRGYSMSNVLGKIKILDRNIKREEKSLKEKGQINFK |
| | | ARRLMLDKSVKFLNDNKISFTISKNLPKEYELDLPEKEKRLNWLKEKIKII |
| | | KNQKPKYAYLLRKDDNFYLQYTLETEFNLKEDYSGIVGIDRGVSHIAVY |
| | | TFVHNNGKNERPLFLNSSEILRLKNLQKERDRFLRRKHNKKRKKSNMRN |
| | | IEKKIQLILHNYSKQIVDFAKNKNAFIVFEKLEKPKKNRSKMSKKSQYKL |
| | | SQFTFKKLSDLVDYKAKREGIKVLYISPEYTSKECSHCGEKVNTQRPFNG |
| | | NSSLFKCNKCGVELNADYNASINIAKKGLNILNSTN |
| Cas14 | 121 | MEESIITGVKFKLRIDKETTKKLNEYFDEYGKAINFAVKIIQKELADDRFA |
| ortholog 15 | | GKAKLDQNKNPILDENGKKIYEFPDEFCSCGKQVNKYVNNKPFCQECY |
| | | KIRFTENGIRKRMYSAKGRKAEHKINILNSTNKISKTHFNYAIREAFILDK |
| | | SIKKQRKKRNERLRESKKRLQQFIDMRDGKREICPTIKGQKVDRFIHPSW |
| | | ITKDKKLEDFRGYTLSIINSKIKILDRNIKREEKSLKEKGQIIFKAKRLMLD |
| | | KSIRFVGDRKVLFTISKTLPKEYELDLPSKEKRLNWLKEKIEIIKNQKPKY |
| | | AYLLRKNIESEKKPNYEYYLQYTLEIKPELKDFYDGAIGIDRGINHIAVCT |
| | | FISNDGKVTPPKFFSSGEILRLKNLQKERDRFLLRKHNKNRKKGNMRVIE |
| | | NKINLILHRYSKQIVDMAKKLNASIVFEELGRIGKSRTKMKKSQRYKLSL |
| | | FIFKKLSDLVDYKSRREGIRVTYVPPEYTSKECSHCGEKVNTQRPFNGNY |
| | | SLFKCNKCGIQLNSDYNASINIAKKGLKIPNST |
| Cas14 | 122 | LWTIVIGDFIEMPKQDLVTTGIKFKLDVDKETRKKLDDYFDEYGKAINFA |
| ortholog 16 | | VKIIQKNLKEDRFAGKIALGEDKKPLLDKDGKKIYNYPNESCSCGNQVR |
| | | RYVNAKPFCVDCYKLKFTENGIRKRMYSARGRKADSDINIKNSTNKISK |
| | | THFNYAIREGFILDKSLKKQRSKRIKKLLELKRKLQEFIDIRQGQMVLCPK |
| | | IKNQRVDKFIHPSWLKRDKKLEEFRGYSLSVVEGKIKIFNRNILREEDSLR |
| | | QRGHVNFKANRIMLDKSVRFLDGGKVNFNLNKGLPKEYLLDLPKKENK |
| | | LSWLNEKISLIKLQKPKYAYLLRREGSFFIQYTIENVPKTFSDYLGAIGIDR |
| | | GISHIAVCTFVSKNGVNKAPVFFSSGEILKLKSLQKQRDLFLRGKHNKIR |
| | | KKSNMRNIDNKINLILHKYSRNIVNLAKSEKAFIVFEKLEKIKKSRFKMS |
| | | KSLQYKLSQFTFKKLSDLVEYKAKIEGIKVDYVPPEYTSKECSHCGEKVD |
| | | TQRPFNGNSSLFKCNKCRVQLNADYNASINIAKKSLNISN |
| Cas14 | 123 | MSKTTISVKLKIIDLSSEKKEFLDNYFNEYAKATTFCQLRIRRLLRNTHW |
| ortholog 17 | | LGKKEKSSKKWIFESGICDLCGENKELVNEDRNSGEPAKICKRCYNGRY |
| | | GNQMIRKLFVSTKKREVQENMDIRRVAKLNNTHYHRIPEEAFDMIKAAD |
| | | TAEKRRKKNVEYDKKRQMEFIEMFNDEKKRAARPKKPNERETRYVHIS |
| | | KLESPSKGYTLNGIKRKIDGMGKKIERAEKGLSRKKIFGYQGNRIKLDSN |
| | | WVRFDLAESEITIPSLFKEMKLRITGPTNVHSKSGQIYFAEWFERINKQPN |
| | | NYCYLIRKTSSNGKYEYYLQYTYEAEVEANKEYAGCLGVDIGCSKLAA |
| | | AVYYDSKNKKAQKPIEIFTNPIKKIKMRREKLIKLLSRVKVRHRRRKLMQ |
| | | LSKTEPIIDYTCHKTARKIVEMANTAKAFISMENLETGIKQKQQARETKK |
| | | QKFYRNMFLFRKLSKLIEYKALLKGIKIVYVKPDYTSQTCSSCGADKEKT |
| | | ERPSQAIFRCLNPTCRYYQRDINADFNAAVNIAKKALNNTEVVTTLL |
| Cas14 | 124 | MARAKNQPYQKLTTTTGIKFKLDLSEEEGKRFDEYFSEYAKAVNFCAKV |
| ortholog 18 | | IYQLRKNLKFAGKKELAAKEWKFEISNCDFCNKQKEIYYKNIANGQKVC |
| | | KGCHRTNFSDNAIRKKMIPVKGRKVESKFNIHNTTKKISGTHRHWAFED |
| | | AADIIESMDKQRKEKQKRLRREKRKLSYFFELFGDPAKRYELPKVGKQR |
| | | VPRYLHKIIDKDSLTKKRGYSLSYIKNKIKISERNIERDEKSLRKASPIAFG |
| | | ARKIKMSKLDPKRAFDLENNVFKIPGKVIKGQYKFFGTNVANEHGKKFY |
| | | KDRISKILAGKPKYFYLLRKKVAESDGNPIFEYYVQWSIDTETPAITSYDN |
| | | ILGIDAGITNLATTVLIPKNLSAEHCSHCGNNHVKPIFTKFFSGKELKAIKI |
| | | KSRKQKYFLRGKHNKLVKIKRIRPIEQKVDGYCHVVSKQIVEMAKERNS |
| | | CIALEKLEKPKKSKFRQRRREKYAVSMFVFKKLATFIKYKAAREGIEIIPV |
| | | EPEGTSYTCSHCKNAQNNQRPYFKPNSKKSWTSMFKCGKCGIELNSDYN |
| | | AAFNIAQKALNMTSA |
| Cas14 | 125 | MDEKHFFCSYCNKELKISKNLINKISKGSIREDEAVSKAISIHNKKEHSLIL |
| ortholog 19 | | GIKFKLFIENKLDKKKLNEYFDNYSKAVTFAARIFDKIRSPYKFIGLKDKN |
| | | TKKWTFPKAKCVFCLEEKEVAYANEKDNSKICTECYLKEFGENGIRKKI |
| | | YSTRGRKVEPKYNIFNSTKELSSTHYNYAIRDAFQLLDALKKQRQKKLK |
| | | SIFNQKLRLKEFEDIFSDPQKRIELSLKPHQREKRYIHLSKSGQESINRGYT |
| | | LRFVRGKIKSLTRNIEREEKSLRKKTPIHFKGNRLMIFPAGIKFDFASNKV |
| | | KISISKNLPNEFNFSGTNVKNEHGKSFFKSRIELIKTQKPKYAYVLRKIKR |
| | | EYSKLRNYEIEKIRLENPNADLCDFYLQYTIETESRNNEEINGIIGIDRGIT |
| | | NLACLVLLKKGDKKPSGVKFYKGNKILGMKIAYRKHLYLLKGKRNKLR |
| | | KQRQIRAIEPKINLILHQISKDIVKIAKEKNFAIALEQLEKPKKARFAQRKK |
| | | EKYKLALFTFKNLSTLIEYKSKREGIPVIYVPPEKTSQMCSHCAINGDEHV |
| | | DTQRPYKKPNAQKPSYSLFKCNKCGIELNADYNAAFNIAQKGLKTLML |
| | | NHSH |
| Cas14 | 126 | MLQTLLVKLDPSKEQYKMLYETMERFNEACNQIAETVFAIHSANKIEVQ |
| ortholog 20 | | KTVYYPIREKFGLSAQLTILAIRKVCEAYKRDKSIKPEFRLDGALVYDQR |
| | | VLSWKGLDKVSLVTLQGRQIIPIKFGDYQKARMDRIRGQADLILVKGVF |
| | | YLCVVVEVSEESPYDPKGVLGVDLGIKNLAVDSDGEVHSGEQTTNTRER |
| | | LDSLKARLQSKGTKSAKRHLKKLSGRMAKFSKDVNHCISKKLVAKAKG |
| | | TLMSIALEDLQGIRDRVTVRKAQRRNLHTWNFGLLRMFVDYKAKIAGV |
| | | PLVFVDPRNTSRTCPSCGHVAKANRPTRDEFRCVSCGFAGAADHIAAMN |
| | | IAFRAEVSQPIVTRFFVQSQAPSFRVG |
| Cas14 | 127 | MDEEPDSAEPNLAPISVKLKLVKLDGEKLAALNDYFNEYAKAVNFCELK |
| ortholog 21 | | MQKIRKNLVNIRGTYLKEKKAWINQTGECCICKKIDELRCEDKNPDING |
| | | KICKKCYNGRYGNQMIRKLFVSTNKRAVPKSLDIRKVARLHNTHYHRIP |
| | | PEAADIIKAIETAERKRRNRILFDERRYNELKDALENEEKRVARPKKPKE |
| | | REVRYVPISKKDTPSKGYTMNALVRKVSGMAKKIERAKRNLNKRKKIE |
| | | YLGRRILLDKNWVRFDFDKSEISIPTMKEFFGEMRFEITGPSNVMSPNGR |
| | | EYFTKWFDRIKAQPDNYCYLLRKESEDETDFYLQYTWRPDAHPKKDYT |
| | | GCLGIDIGGSKLASAVYFDADKNRAKQPIQIFSNPIGKWKTKRQKVIKVL |
| | | SKAAVRHKTKKLESLRNIEPRIDVHCHRIARKIVGMALAANAFISMENLE |
| | | GGIREKQKAKETKKQKFSRNMFVFRKLSKLIEYKALMEGVKVVYIVPDY |
| | | TSQLCSSCGTNNTKRPKQAIFMCQNTECRYFGKNINADFNAAINIAKKAL |
| | | NRKDIVRELS |
| Cas14 | 128 | MEKNNSEQTSITTGIKFKLKLDKETKEKLNNYFDEYGKAINFAVRIIQMQ |
| ortholog 22 | | LNDDRLAGKYKRDEKGKPILGEDGKKILEIPNDFCSCGNQVNHYVNGVS |
| | | FCQECYKKRFSENGIRKRMYSAKGRKAEQDINIKNSTNKISKTHFNYAIR |
| | | EAFNLDKSIKKQREKRFKKLKDMKRKLQEFLEIRDGKRVICPKIEKQKVE |
| | | RYIHPSWINKEKKLEEFRGYSLSIVNSKIKSFDRNIQREEKSLKEKGQINF |
| | | KAQRLMLDKSVKFLKDNKVSFTISKELPKTFELDLPKKEKKLNWLNEKL |
| | | EIIKNQKPKYAYLLRKENNIFLQYTLDSIPEIHSEYSGAVGIDRGVSHIAV |
| | | YTFLDKDGKNERPFFLSSSGILRLKNLQKERDKFLRKKHNKIRKKGNMR |
| | | NIEQKINLILHEYSKQIVNFAKDKNAFIVFELLEKPKKSRERMSKKIQYKL |
| | | SQFTFKKLSDLVDYKAKREGIKVIYVEPAYTSKDCSHCGERVNTQRPFN |
| | | GNFSLFKCNKCGIVLNSDYNASLNIARKGLNISAN |
| Cas14 | 129 | MAEEKFFFCEKCNKDIKIPKNYINKQGAEEKARAKHEHRVHALILGIKFK |
| ortholog 23 | | IYPKKEDISKLNDYFDEYAKAVTFTAKIVDKLKAPFLFAGKRDKDTSKK |
| | | KWVFPVDKCSFCKEKTEINYRTKQGKNICNSCYLTEFGEQGLLEKIYAT |
| | | KGRKVSSSFNLFNSTKKLTGTHNNYVVKESLQLLDALKKQRSKRLKKLS |
| | | NTRRKLKQFEEMFEKEDKRFQLPLKEKQRELRFIHVSQKDRATEFKGYT |
| | | MNKIKSKIKVLRRNIEREQRSLNRKSPVFFRGTRIRLSPSVQFDDKDNKIK |
| | | LTLSKELPKEYSFSGLNVANEHGRKFFAEKLKLIKENKSKYAYLLRRQV |
| | | NKNNKKPIYDYYLQYTVEFLPNIITNYNGILGIDRGINTLACIVLLENKKE |
| | | KPSFVKFFSGKGILNLKNKRRKQLYFLKGVHNKYRKQQKIRPIEPRIDQIL |
| | | HDISKQIIDLAKEKRVAISLEQLEKPQKPKFRQSRKAKYKLSQFNFKTLSN |
| | | YIDYKAKKEGIRVIYIAPEMTSQNCSRCAMKNDLHVNTQRPYKNTSSLF |
| | | KCNKCGVELNADYNAAFNIAQKGLKILNS |
| Cas14 | 130 | MISLKLKLLPDEEQKKLLDEMFWKWASICTRVGFGRADKEDLKPPKDA |
| ortholog 24 | | EGVWFSLTQLNQANTDINDLREAMKHQKHRLEYEKNRLEAQRDDTQD |
| | | ALKNPDRREISTKRKDLFRPKASVEKGFLKLKYHQERYWVRRLKEINKL |
| | | IERKTKTLIKIEKGRIKFKATRITLHQGSFKIRFGDKPAFLIKALSGKNQID |
| | | APFVVVPEQPICGSVVNSKKYLDEITTNFLAYSVNAMLFGLSRSEEMLLK |
| | | AKRPEKIKKKEEKLAKKQSAFENKKKELQKLLGRELTQQEEAIIEETRNQ |
| | | FFQDFEVKITKQYSELLSKIANELKQKNDFLKVNKYPILLRKPLKKAKSK |
| | | KINNLSPSEWKYYLQFGVKPLLKQKSRRKSRNVLGIDRGLKHLLAVTVL |
| | | EPDKKTFVWNKLYPNPITGWKWRRRKLLRSLKRLKRRIKSQKHETIHEN |
| | | QTRKKLKSLQGRIDDLLHNISRKIVETAKEYDAVIVVEDLQSMRQHGRS |
| | | KGNRLKTLNYALSLFDYANVMQLIKYKAGIEGIQIYDVKPAGTSQNCAY |
| | | CLLAQRDSHEYKRSQENSKIGVCLNPNCQNHKKQIDADLNAARVIASCY |
| | | ALKINDSQPFGTRKRFKKRTTN |
| Cas14 | 131 | METLSLKLKLNPSKEQLLVLDKMFWKWASICTRLGLKKAEMSDLEPPK |
| ortholog 25 | | DAEGVWFSKTQLNQANTDVNDLRKAMQHQGKRIEYELDKVENRRNEI |
| | | QEMLEKPDRRDISPNRKDLFRPKAAVEKGYLKLKYHKLGYWSKELKTA |
| | | NKLIERKRKTLAKIDAGKMKFKPTRISLHTNSFRIKFGEEPKIALSTTSKH |
| | | EKIELPLITSLQRPLKTSCAKKSKTYLDAAILNFLAYSTNAALFGLSRSEE |
| | | MLLKAKKPEKIEKRDRKLATKRESFDKKLKTLEKLLERKLSEKEKSVFK |
| | | RKQTEFFDKFCITLDETYVEALHRIAEELVSKNKYLEIKKYPVLLRKPESR |
| | | LRSKKLKNLKPEDWTYYIQFGFQPLLDTPKPIKTKTVLGIDRGVRHLLAV |
| | | SIFDPRTKTFTFNRLYSNPIVDWKWRRRKLLRSIKRLKRRLKSEKHVHLH |
| | | ENQFKAKLRSLEGRIEDHFHNLSKEIVDLAKENNSVIVVENLGGMRQHG |
| | | RGRGKWLKALNYALSHFDYAKVMQLIKYKAELAGVFVYDVAPAGTSI |
| | | NCAYCLLNDKDASNYTRGKVINGKKNTKIGECKTCKKEFDADLNAARV |
| | | IALCYEKRLNDPQPFGTRKQFKPKKP |
| Cas14 | 132 | MKALKLQLIPTRKQYKILDEMFWKWASLANRVSQKGESKETLAPKKDI |
| ortholog 26 | | QKIQFNATQLNQIEKDIKDLRGAMKEQQKQKERLLLQIQERRSTISEMLN |
| | | DDNNKERDPHRPLNFRPKGWRKFHTSKHWVGELSKILRQEDRVKKTIER |
| | | IVAGKISFKPKRIGIWSSNYKINFFKRKISINPLNSKGFELTLMTEPTQDLIG |
| | | KNGGKSVLNNKRYLDDSIKSLLMFALHSRFFGLNNTDTYLLGGKINPSL |
| | | VKYYKKNQDMGEFGREIVEKFERKLKQEINEQQKKIIMSQIKEQYSNRD |
| | | SAFNKDYLGLINEFSEVFNQRKSERAEYLLDSFEDKIKQIKQEIGESLNISD |
| | | WDFLIDEAKKAYGYEEGFTEYVYSKRYLEILNKIVKAVLITDIYFDLRKY |
| | | PILLRKPLDKIKKISNLKPDEWSYYIQFGYDSINPVQLMSTDKFLGIDRGL |
| | | THLLAYSVFDKEKKEFIINQLEPNPIMGWKWKLRKVKRSLQHLERRIRA |
| | | QKMVKLPENQMKKKLKSIEPKIEVHYHNISRKIVNLAKDYNASIVVESLE |
| | | GGGLKQHGRKKNARNRSLNYALSLFDYGKIASLIKYKADLEGVPMYEV |
| | | LPAYTSQQCAKCVLEKGSFVDPEIIGYVEDIGIKGSLLDSLFEGTELSSIQV |
| | | LKKIKNKIELSARDNHNKEINLILKYNFKGLVIVRGQDKEEIAEHPIKEIN |
| | | GKFAILDFVYKRGKEKVGKKGNQKVRYTGNKKVGYCSKHGQVDADLN |
| | | ASRVIALCKYLDINDPILFGEQRKSFK |
| Cas14 | 133 | MVTRAIKLKLDPTKNQYKLLNEMFWKWASLANRFSQKGASKETLAPK |
| ortholog 27 | | DGTQKIQFNATQLNQIKKDVDDLRGAMEKQGKQKERLLIQIQERLLTISE |
| | | ILRDDSKKEKDPHRPQNFRPFGWRRFHTSAYWSSEASKLTRQVDRVRRT |
| | | IERIKAGKINFKPKRIGLWSSTYKINFLKKKINISPLKSKSFELDLITEPQQK |
| | | IIGKEGGKSVANSKKYLDDSIKSLLIFAIKSRLFGLNNKDKPLFENIITPNL |
| | | VRYHKKGQEQENFKKEVIKKFENKLKKEISQKQKEIIFSQIERQYENRDA |
| | | TFSEDYLRAISEFSEIFNQRKKERAKELLNSFNEKIRQLKKEVNGNISEED |
| | | LKILEVEAEKAYNYENGFIEWEYSEQFLGVLEKIARAVLISDNYFDLKKY |
| | | PILIRKPTNKSKKITNLKPEEWDYYIQFGYGLINSPMKIETKNFMGIDRGL |
| | | THLLAYSIFDRDSEKFTINQLELNPIKGWKWKLRKVKRSLQHLERRMRA |
| | | QKGVKLPENQMKKRLKSIEPKIESYYHNLSRKIVNLAKANNASIVVESLE |
| | | GGGLKQHGRKKNSRHRALNYALSLFDYGKIASLIKYKSDLEGVPMYEV |
| | | LPAYTSQQCAKCVLKKGSFVEPEIIGYIEEIGFKENLLTLLFEDTGLSSVQ |
| | | VLKKSKNKMTLSARDKEGKMVDLVLKYNFKGLVISQEKKKEEIVEFPIK |
| | | EIDGKFAVLDSAYKRGKERISKKGNQKLVYTGNKKVGYCSVHGQVDAD |
| | | LNASRVIALCKYLGINEPIVFGEQRKSFK |
| Cas14 | 134 | LDLITEPIQPHKSSSLRSKEFLEYQISDFLNFSLHSLFFGLASNEGPLVDFKI |
| ortholog 28 | | YDKIVIPKPEERFPKKESEEGKKLDSFDKRVEEYYSDKLEKKIERKLNTEE |
| | | KNVIDREKTRIWGEVNKLEEIRSIIDEINEIKKQKHISEKSKLLGEKWKKV |
| | | NNIQETLLSQEYVSLISNLSDELTNKKKELLAKKYSKFDDKIKKIKEDYG |
| | | LEFDENTIKKEGEKAFLNPDKFSKYQFSSSYLKLIGEIARSLITYKGFLDL |
| | | NKYPIIFRKPINKVKKIHNLEPDEWKYYIQFGYEQINNPKLETENILGIDR |
| | | GLTHILAYSVFEPRSSKFILNKLEPNPIEGWKWKLRKLRRSIQNLERRWR |
| | | AQDNVKLPENQMKKNLRSIEDKVENLYHNLSRKIVDLAKEKNACIVFEK |
| | | LEGQGMKQHGRKKSDRLRGLNYKLSLFDYGKIAKLIKYKAEIEGIPIYRI |
| | | DSAYTSQNCAKCVLESRRFAQPEEISCLDDFKEGDNLDKRILEGTGLVEA |
| | | KIYKKLLKEKKEDFEIEEDIAMFDTKKVIKENKEKTVILDYVYTRRKEIIG |
| | | TNHKKNIKGIAKYTGNTKIGYCMKHGQVDADLNASRTIALCKNFDINNP |
| | | EIWK |
| Cas14 | 135 | MSDESLVSSEDKLAIKIKIVPNAEQAKMLDEMFKKWSSICNRISRGKEDI |
| ortholog 29 | | ETLRPDEGKELQFNSTQLNSATMDVSDLKKAMARQGERLEAEVSKLRG |
| | | RYETIDASLRDPSRRHTNPQKPSSFYPSDWDISGRLTPRFHTARHYSTELR |
| | | KLKAKEDKMLKTINKIKNGKIVFKPKRITLWPSSVNMAFKGSRLLLKPFA |
| | | NGFEMELPIVISPQKTADGKSQKASAEYMRNALLGLAGYSINQLLFGMN |
| | | RSQKMLANAKKPEKVEKFLEQMKNKDANFDKKIKALEGKWLLDRKLK |
| | | ESEKSSIAVVRTKFFKSGKVELNEDYLKLLKHMANEILERDGFVNLNKY |
| | | PILSRKPMKRYKQKNIDNLKPNMWKYYIQFGYEPIFERKASGKPKNIMGI |
| | | DRGLTHLLAVAVFSPDQQKFLFNHLESNPIMHWKWKLRKIRRSIQHMER |
| | | RIRAEKNKHIHEAQLKKRLGSIEEKTEQHYHIVSSKIINWAIEYEAAIVLES |
| | | LSHMKQRGGKKSVRTRALNYALSLFDYEKVARLITYKARIRGIPVYDVL |
| | | PGMTSKTCATCLLNGSQGAYVRGLETTKAAGKATKRKNMKIGKCMVC |
| | | NSSENSMIDADLNAARVIAICKYKNLNDPQPAGSRKVFKRF |
| Cas14 | 136 | MLALKLKIMPTEKQAEILDAMFWKWASICSRIAKMKKKVSVKENKKEL |
| ortholog 30 | | SKKIPSNSDIWFSKTQLCQAEVDVGDHKKALKNFEKRQESLLDELKYKV |
| | | KAINEVINDESKREIDPNNPSKFRIKDSTKKGNLNSPKFFTLKKWQKILQE |
| | | NEKRIKKKESTIEKLKRGNIFFNPTKISLHEEEYSINFGSSKLLLNCFYKYN |
| | | KKSGINSDQLENKFNEFQNGLNIICSPLQPIRGSSKRSFEFIRNSIINFLMYS |
| | | LYAKLFGIPRSVKALMKSNKDENKLKLEEKLKKKKSSFNKTVKEFEKMI |
| | | GRKLSDNESKILNDESKKFFEIIKSNNKYIPSEEYLKLLKDISEEIYNSNIDF |
| | | KPYKYSILIRKPLSKFKSKKLYNLKPTDYKYYLQLSYEPFSKQLIATKTIL |
| | | GIDRGLKHLLAVSVFDPSQNKFVYNKLIKNPVFKWKKRYHDLKRSIRNR |
| | | ERRIRALTGVHIHENQLIKKLKSMKNKINVLYHNVSKNIVDLAKKYESTI |
| | | VLERLENLKQHGRSKGKRYKKLNYVLSNFDYKKIESLISYKAKKEGVPV |
| | | SNINPKYTSKTCAKCLLEVNQLSELKNEYNRDSKNSKIGICNIHGQIDAD |
| | | LNAARVIALCYSKNLNEPHFK |
| Cas14 | 137 | VINLFGYKFALYPNKTQEELLNKHLGECGWLYNKAIEQNEYYKADSNIE |
| ortholog 31 | | EAQKKFELLPDKNSDEAKVLRGNISKDNYVYRTLVKKKKSEINVQIRKA |
| | | VVLRPAETIRNLAKVKKKGLSVGRLKFIPIREWDVLPFKQSDQIRLEENY |
| | | LILEPYGRLKFKMHRPLLGKPKTFCIKRTATDRWTISFSTEYDDSNMRKN |
| | | DGGQVGIDVGLKTHLRLSNENPDEDPRYPNPKIWKRYDRRLTILQRRISK |
| | | SKKLGKNRTRLRLRLSRLWEKIRNSRADLIQNETYEILSENKLIAIEDLNV |
| | | KGMQEKKDKKGRKGRTRAQEKGLHRSISDAAFSEFRRVLEYKAKRFGS |
| | | EVKPVSAIDSSKECHNCGNKKGMPLESRIYECPKCGLKIDRDLNSAKVIL |
| | | ARATGVRPGSNARADTKISATAGASVQTEGTVSEDFRQQMETSDQKPM |
| | | QGEGSKEPPMNPEHKSSGRGSKHVNIGCKNKVGLYNEDENSRSTEKQIM |
| | | DENRSTTEDMVEIGALHSPVLTT |
| Cas14 | 138 | MIASIDYEAVSQALIVFEFKAKGKDSQYQAIDEAIRSYRFIRNSCLRYWM |
| ortholog 32 | | DNKKVGKYDLNKYCKVLAKQYPFANKLNSQARQSAAECSWSAISRFYD |
| | | NCKRKVSGKKGFPKFKKHARSVEYKTSGWKLSENRKAITFTDKNGIGKL |
| | | KLKGTYDLHFSQLEDMKRVRLVRRADGYYVQFCISVDVKVETEPTGKA |
| | | IGLDVGIKYFLADSSGNTIENPQFYRKAEKKLNRANRRKSKKYIRGVKPQ |
| | | SKNYHKARCRYARKHLRVSRQRKEYCKRVAYCVIHSNDVVAYEDLNV |
| | | KGMVKNRHLAKSISDVAWSTFRHWLEYFAIKYGKLTIPVAPHNTSQNCS |
| | | NCDKKVPKSLSTRTHICHHCGYSEDRDVNAAKNILKKALSTVGQTGSLK |
| | | LGEIEPLLVLEQSCTRKFDL |
| Cas14 | 139 | LAEENTLHLTLAMSLPLNDLPENRTRSELWRRQWLPQKKLSLLLGVNQS |
| ortholog 33 | | VRKAAADCLRWFEPYQELLWWEPTDPDGKKLLDKEGRPIKRTAGHMR |
| | | VLRKLEEIAPFRGYQLGSAVKNGLRHKVADLLLSYAKRKLDPQFTDKTS |
| | | YPSIGDQFPIVWTGAFVCYEQSITGQLYLYLPLFPRGSHQEDITNNYDPDR |
| | | GPALQVFGEKEIARLSRSTSGLLLPLQFDKWGEATFIRGENNPPTWKATH |
| | | RRSDKKWLSEVLLREKDFQPKRVELLVRNGRIFVNVACEIPTKPLLEVEN |
| | | FMGVSFGLEHLVTVVVINRDGNVVHQRQEPARRYEKTYFARLERLRRR |
| | | GGPFSQELETFHYRQVAQIVEEALRFKSVPAVEQVGNIPKGRYNPRLNLR |
| | | LSYWPFGKLADLTSYKAVKEGLPKPYSVYSATAKMLCSTCGAANKEGD |
| | | QPISLKGPTVYCGNCGTRHNTGENTALNLARRAQELFVKGVVAR |
| Cas14 | 140 | MSQSLLKWHDMAGRDKDASRSLQKSAVEGVLLHLTASHRVALEMLEK |
| ortholog 34 | | SVSQTVAVTMEAAQQRLVIVLEDDPTKATSRKRVISADLQFTREEFGSLP |
| | | NWAQKLASTCPEIATKYADKHINSIRIAWGVAKESTNGDAVEQKLQWQI |
| | | RLLDVTMFLQQLVLQLADKALLEQIPSSIRGGIGQEVAQQVTSHIQLLDS |
| | | GTVLKAELPTISDRNSELARKQWEDAIQTVCTYALPFSRERARILDPGKY |
| | | AAEDPRGDRLINIDPMWARVLKGPTVKSLPLLFVSGSSIRIVKLTLPRKH |
| | | AAGHKHTFTATYLVLPVSREWINSLPGTVQEKVQWWKKPDVLATQELL |
| | | VGKGALKKSANTLVIPISAGKKRFFNHILPALQRGFPLQWQRIVGRSYRR |
| | | PATHRKWFAQLTIGYTNPSSLPEMALGIHFGMKDILWWALADKQGNILK |
| | | DGSIPGNSILDFSLQEKGKIERQQKAGKNVAGKKYGKSLLNATYRVVNG |
| | | VLEFSKGISAEHASQPIGLGLETIRFVDKASGSSPVNARHSNWNYGQLSGI |
| | | FANKAGPAGFSVTEITLKKAQRDLSDAEQARVLAIEATKRFASRIKRLAT |
| | | KRKDDTLFV |
| Cas14 | 141 | VEPVEKERFYYRTYTFRLDGQPRTQNLTTQSGWGLLTKAVLDNTKHYW |
| ortholog 35 | | EIVHHARIANQPIVFENPVIDEQGNPKLNKLGQPRFWKRPISDIVNQLRAL |
| | | FENQNPYQLGSSLIQGTYWDVAENLASWYALNKEYLAGTATWGEPSFP |
| | | EPHPLTEINQWMPLTFSSGKVVRLLKNASGRYFIGLPILGENNPCYRMRT |
| | | IEKLIPCDGKGRVTSGSLILFPLVGIYAQQHRRMTDICESIRTEKGKLAWA |
| | | QVSIDYVREVDKRRRMRRTRKSQGWIQGPWQEVFILRLVLAHKAPKLY |
| | | KPRCFAGISLGPKTLASCVILDQDERVVEKQQWSGSELLSLIHQGEERLR |
| | | SLREQSKPTWNAAYRKQLKSLINTQVFTIVTFLRERGAAVRLESIARVRK |
| | | STPAPPVNFLLSHWAYRQITERLKDLAIRNGMPLTHSNGSYGVRFTCSQC |
| | | GATNQGIKDPTKYKVDIESETFLCSICSHREIAAVNTATNLAKQLLDE |
| Cas14 | 142 | MNDTETSETLTSHRTVCAHLHVVGETGSLPRLVEAALAELITLNGRATQ |
| ortholog 36 | | ALLSLAKNGLVLRRDKEENLIAAELTLPCRKNKYADVAAKAGEPILATRI |
| | | NNKGKLVTKKWYGEGNSYHIVRFTPETGMFTVRVFDRYAFDEELLHLH |
| | | SEVVFGSDLPKGIKAKTDSLPANFLQAVFTSFLELPFQGFPDIVVKPAMK |
| | | QAAEQLLSYVQLEAGENQQAEYPDTNERDPELRLVEWQKSLHELSVRT |
| | | EPFEFVRARDIDYYAETDRRGNRFVNITPEWTKFAESPFARRLPLKIPPEF |
| | | CILLRRKTEGHAKIPNRIYLGLQIFDGVTPDSTLGVLATAEDGKLFWWHD |
| | | HLDEFSNLEGKPEPKLKNKPQLLMVSLEYDREQRFEESVGGDRKICLVT |
| | | LKETRNFRRGWNGRILGIHFQHNPVITWALMDHDAEVLEKGFIEGNAFL |
| | | GKALDKQALNEYLQKGGKWVGDRSFGNKLKGITHTLASLIVRLAREKD |
| | | AWIALEEISWVQKQSADSVANHEIVEQPHHSLTR |
| Cas14 | 143 | MNDTETSETLTSHRTVCAHLHVVGETGSLPRLVEAALAELITLNGRATQ |
| ortholog 37 | | ALLSLAKNGLVLRRDKEENLIAAELTLPCRKNKYADVAAKAGEPILATRI |
| | | NNKGKLVTKKWYGEGNSYHIVRFTPETGMFTVRVFDRYAFDEELLHLH |
| | | SEVVFGSDLPKGIKAKTDSLPANFLQAVFTSFLELPFQGFPDIVVKPAMK |
| | | QAAEQLLSYVQLEAGENQQAEYPDTNERDPELRLVEWQKSLHELSVRT |
| | | EPFEFVRARDIDYYAETDRRGNRFVNITPEWTKFAESPFARRLPLKIPPEF |
| | | CILLRRKTEGHAKIPNRIYLGLQIFDGVTPDSTLGVLATAEDGKLFWWHD |
| | | HLDEFSNLEGKPEPKLKNKPQLLMVSLEYDREQRFEESVGGDRKICLVT |
| | | LKETRNFRRGRHGHTRTDRLPAGNTLWRADFATSAEVAAPKWNGRILG |
| | | IHFQHNPVITWALMDHDAEVLEKGFIEGNAFLGKALDKQALNEYLQKG |
| | | GKWVGDRSFGNKLKGITHTLASLIVRLAREKDAWIALEEISWVQKQSAD |
| | | SVANRRFSMWNYSRLATLIEWLGTDIATRDCGTAAPLAHKVSDYLTHFT |
| | | CPECGACRKAGQKKEIADTVRAGDILTCRKCGFSGPIPDNFIAEFVAKKA |
| | | LERMLKKKPV |
| Cas14 | 144 | MAKRNFGEKSEALYRAVRFEVRPSKEELSILLAVSEVLRMLFNSALAER |
| ortholog 38 | | QQVFTEFIASLYAELKSASVPEEISEIRKKLREAYKEHSISLFDQINALTAR |
| | | RVEDEAFASVTRNWQEETLDALDGAYKSFLSLRRKGDYDAHSPRSRDS |
| | | GFFQKIPGRSGFKIGEGRIALSCGAGRKLSFPIPDYQQGRLAETTKLKKFE |
| | | LYRDQPNLAKSGRFWISVVYELPKPEATTCQSEQVAFVALGASSIGVVS |
| | | QRGEEVIALWRSDKHWVPKIEAVEERMKRRVKGSRGWLRLLNSGKRR |
| | | MHMISSRQHVQDEREIVDYLVRNHGSHFVVTELVVRSKEGKLADSSKPE |
| | | RGGSLGLNWAAQNTGSLSRLVRQLEEKVKEHGGSVRKHKLTLTEAPPA |
| | | RGAENKLWMARKLRESFLKEV |
| Cas14 | 145 | LAKNDEKELLYQSVKFEIYPDESKIRVLTRVSNILVLVWNSALGERRARF |
| ortholog 39 | | ELYIAPLYEELKKFPRKSAESNALRQKIREGYKEHIPTFFDQLKKLLTPMR |
| | | KEDPALLGSVPRAYQEETLNTLNGSFVSFMTLRRNNDMDAKPPKGRAE |
| | | DRFHEISGRSGFKIDGSEFVLSTKEQKLRFPIPNYQLEKLKEAKQIKKFTL |
| | | YQSRDRRFWISIAYEIELPDQRPFNPEEVIYIAFGASSIGVISPEGEKVIDFW |
| | | RPDKHWKPKIKEVENRMRSCKKGSRAWKKRAAARRKMYAMTQRQQK |
| | | LNHREIVASLLRLGFHFVVTEYTVRSKPGKLADGSNPKRGGAPQGFNWS |
| | | AQNTGSFGEFILWLKQKVKEQGGTVQTFRLVLGQSERPEKRGRDNKIEM |
| | | VRLLREKYLESQTIVV |
| Cas14 | 146 | MAKGKKKEGKPLYRAVRFEIFPTSDQITLFLRVSKNLQQVWNEAWQER |
| ortholog 40 | | QSCYEQFFGSIYERIGQAKKRAQEAGFSEVWENEAKKGLNKKLRQQEIS |
| | | MQLVSEKESLLQELSIAFQEHGVTLYDQINGLTARRIIGEFALIPRNWQEE |
| | | TLDSLDGSFKSFLALRKNGDPDAKPPRQRVSENSFYKIPGRSGFKVSNGQ |
| | | IYLSFGKIGQTLTSVIPEFQLKRLETAIKLKKFELCRDERDMAKPGRFWIS |
| | | VAYEIPKPEKVPVVSKQITYLAIGASRLGVVSPKGEFCLNLPRSDYHWKP |
| | | QINALQERLEGVVKGSRKWKKRMAACTRMFAKLGHQQKQHGQYEVV |
| | | KKLLRHGVHFVVTELKVRSKPGALADASKSDRKGSPTGPNWSAQNTGN |
| | | IARLIQKLTDKASEHGGTVIKRNPPLLSLEERQLPDAQRKIFIAKKLREEFL |
| | | ADQK |
| Cas14 | 147 | MAKREKKDDVVLRGTKMRIYPTDRQVTLMDMWRRRCISLWNLLLNLE |
| ortholog 41 | | TAAYGAKNTRSKLGWRSIWARVVEENHAKALIVYQHGKCKKDGSFVL |
| | | KRDGTVKHPPRERFPGDRKILLGLFDALRHTLDKGAKCKCNVNQPYALT |
| | | RAWLDETGHGARTADIIAWLKDFKGECDCTAISTAAKYCPAPPTAELLT |
| | | KIKRAAPADDLPVDQAILLDLFGALRGGLKQKECDHTHARTVAYFEKHE |
| | | LAGRAEDILAWLIAHGGTCDCKIVEEAANHCPGPRLFIWEHELAMIMAR |
| | | LKAEPRTEWIGDLPSHAAQTVVKDLVKALQTMLKERAKAAAGDESARK |
| | | TGFPKFKKQAYAAGSVYFPNTTMFFDVAAGRVQLPNGCGSMRCEIPRQ |
| | | LVAELLERNLKPGLVIGAQLGLLGGRIWRQGDRWYLSCQWERPQPTLLP |
| | | KTGRTAGVKIAASIVFTTYDNRGQTKEYPMPPADKKLTAVHLVAGKQN |
| | | SRALEAQKEKEKKLKARKERLRLGKLEKGHDPNALKPLKRPRVRRSKLF |
| | | YKSAARLAACEAIERDRRDGFLHRVTNEIVHKFDAVSVQKMSVAPMMR |
| | | RQKQKEKQIESKKNEAKKEDNGAAKKPRNLKPVRKLLRHVAMARGRQ |
| | | FLEYKYNDLRGPGSVLIADRLEPEVQECSRCGTKNPQMKDGRRLLRCIG |
| | | VLPDGTDCDAVLPRNRNAARNAEKRLRKHREAHNA |
| Cas14 | 148 | MNEVLPIPAVGEDAADTIMRGSKMRIYPSVRQAATMDLWRRRCIQLWN |
| ortholog 42 | | LLLELEQAAYSGENRRTQIGWRSIWATVVEDSHAEAVRVAREGKKRKD |
| | | GTFRKAPSGKEIPPLDPAMLAKIQRQMNGAVDVDPKTGEVTPAQPRLFM |
| | | WEHELQKIMARLKQAPRTHWIDDLPSHAAQSVVKDLIKALQAMLRERK |
| | | KRASGIGGRDTGFPKFKKNRYAAGSVYFANTQLRFEAKRGKAGDPDAV |
| | | RGEFARVKLPNGVGWMECRMPRHINAAHAYAQATLMGGRIWRQGEN |
| | | WYLSCQWKMPKPAPLPRAGRTAAIKIAAAIPITTVDNRGQTREYAMPPI |
| | | DRERIAAHAAAGRAQSRALEARKRRAKKREAYAKKRHAKKLERGIAAK |
| | | PPGRARIKLSPGFYAAAAKLAKLEAEDANAREAWLHEITTQIVRNFDVIA |
| | | VPRMEVAKLMKKPEPPEEKEEQVKAPWQGKRRSLKAARVMMRRTAM |
| | | ALIQTTLKYKAVDLRGPQAYEEIAPLDVTAAACSGCGVLKPEWKMARA |
| | | KGREIMRCQEPLPGGKTCNTVLTYTRNSARVIGRELAVRLAERQKA |
| Cas14 | 149 | MTTQKTYNFCFYDQRFFELSKEAGEVYSRSLEEFWKIYDETGVWLSKFD |
| ortholog 43 | | LQKHMRNKLERKLLHSDSFLGAMQQVHANLASWKQAKKVVPDACPPR |
| | | KPKFLQAILFKKSQIKYKNGFLRLTLGTEKEFLYLKWDINIPLPIYGSVTY |
| | | SKTRGWKINLCLETEVEQKNLSENKYLSIDLGVKRVATIFDGENTITLSG |
| | | KKFMGLMHYRNKLNGKTQSRLSHKKKGSNNYKKIQRAKRKTTDRLLNI |
| | | QKEMLHKYSSFIVNYAIRNDIGNIIIGDNSSTHDSPNMRGKTNQKISQNPE |
| | | QKLKNYIKYKFESISGRVDIVPEPYTSRKCPHCKNIKKSSPKGRTYKCKK |
| | | CGFIFDRDGVGAINIYNENVSFGQIISPGRIRSLTEPIGMKFHNEIYFKSYV |
| | | AA |
| Cas14 | 150 | MSVRSFQARVECDKQTMEHLWRTHKVFNERLPEIIKILFKMKRGECGQN |
| ortholog 44 | | DKQKSLYKSISQSILEANAQNADYLLNSVSIKGWKPGTAKKYRNASFTW |
| | | ADDAAKLSSQGIHVYDKKQVLGDLPGMMSQMVCRQSVEAISGHIELTK |
| | | KWEKEHNEWLKEKEKWESEDEHKKYLDLREKFEQFEQSIGGKITKRRG |
| | | RWHLYLKWLSDNPDFAAWRGNKAVINPLSEKAQIRINKAKPNKKNSVE |
| | | RDEFFKANPEMKALDNLHGYYERNFVRRRKTKKNPDGFDHKPTFTLPH |
| | | PTIHPRWFVFNKPKTNPEGYRKLILPKKAGDLGSLEMRLLTGEKNKGNY |
| | | PDDWISVKFKADPRLSLIRPVKGRRVVRKGKEQGQTKETDSYEFFDKHL |
| | | KKWRPAKLSGVKLIFPDKTPKAAYLYFTCDIPDEPLTETAKKIQWLETGD |
| | | VTKKGKKRKKKVLPHGLVSCAVDLSMRRGTTGFATLCRYENGKIHILRS |
| | | RNLWVGYKEGKGCHPYRWTEGPDLGHIAKHKREIRILRSKRGKPVKGE |
| | | ESHIDLQKHIDYMGEDRFKKAARTIVNFALNTENAASKNGFYPRADVLL |
| | | LENLEGLIPDAEKERGINRALAGWNRRHLVERVIEMAKDAGFKRRVFEI |
| | | PPYGTSQVCSKCGALGRRYSIIRENNRREIRFGYVEKLFACPNCGYCANA |
| | | DHNASVNLNRRFLIEDSFKSYYDWKRLSEKKQKEEIETIESKLMDKLCA |
| | | MHKISRGSISK |
| Cas14 | 151 | MHLWRTHCVFNQRLPALLKRLFAMRRGEVGGNEAQRQVYQRVAQFVL |
| ortholog 45 | | ARDAKDSVDLLNAVSLRKRSANSAFKKKATISCNGQAREVTGEEVFAE |
| | | AVALASKGVFAYDKDDMRAGLPDSLFQPLTRDAVACMRSHEELVATW |
| | | KKEYREWRDRKSEWEAEPEHALYLNLRPKFEEGEAARGGRFRKRAERD |
| | | HAYLDWLEANPQLAAWRRKAPPAVVPIDEAGKRRIARAKAWKQASVR |
| | | AEEFWKRNPELHALHKIHVQYLREFVRPRRTRRNKRREGFKQRPTFTMP |
| | | DPVRHPRWCLFNAPQTSPQGYRLLRLPQSRRTVGSVELRLLTGPSDGAG |
| | | FPDAWVNVRFKADPRLAQLRPVKVPRTVTRGKNKGAKVEADGFRYYD |
| | | DQLLIERDAQVSGVKLLFRDIRMAPFADKPIEDRLLSATPYLVFAVEIKD |
| | | EARTERAKAIRFDETSELTKSGKKRKTLPAGLVSVAVDLDTRGVGFLTR |
| | | AVIGVPEIQQTHHGVRLLQSRYVAVGQVEARASGEAEWSPGPDLAHIAR |
| | | HKREIRRLRQLRGKPVKGERSHVRLQAHIDRMGEDRFKKAARKIVNEAL |
| | | RGSNPAAGDPYTRADVLLYESLETLLPDAERERGINRALLRWNRAKLIE |
| | | HLKRMCDDAGIRHFPVSPFGTSQVCSKCGALGRRYSLARENGRAVIRFG |
| | | WVERLFACPNPECPGRRPDRPDRPFTCNSDHNASVNLHRVFALGDQAV |
| | | AAFRALAPRDSPARTLAVKRVEDTLRPQLMRVHKLADAGVDSPF |
| Cas14 | 152 | MATLVYRYGVRAHGSARQQDAVVSDPAMLEQLRLGHELRNALVGVQH |
| ortholog 46 | | RYEDGKRAVWSGFASVAAADHRVTTGETAVAELEKQARAEHSADRTA |
| | | ATRQGTAESLKAARAAVKQARADRKAAMAAVAEQAKPKIQALGDDRD |
| | | AEIKDLYRRFCQDGVLLPRCGRCAGDLRSDGDCTDCGAAHEPRKLYWA |
| | | TYNAIREDHQTAVKLVEAKRKAGQPARLRFRRWTGDGTLTVQLQRMH |
| | | GPACRCVTCAEKLTRRARKTDPQAPAVAADPAYPPTDPPRDPALLASGQ |
| | | GKWRNVLQLGTWIPPGEWSAMSRAERRRVGRSHIGWQLGGGRQLTLP |
| | | VQLHRQMPADADVAMAQLTRVRVGGRHRMSVALTAKLPDPPQVQGLP |
| | | PVALHLGWRQRPDGSLRVATWACPQPLDLPPAVADVVVSHGGRWGEV |
| | | IMPARWLADAEVPPRLLGRRDKAMEPVLEALADWLEAHTEACTARMTP |
| | | ALVRRWRSQGRLAGLTNRWRGQPPTGSAEILTYLEAWRIQDKLLWERE |
| | | SHLRRRLAARRDDAWRRVASWLARHAGVLVVDDADIAELRRRDDPAD |
| | | TDPTMPASAAQAARARAALAAPGRLRHLATITATRDGLGVHTVASAGL |
| | | TRLHRKCGHQAQPDPRYAASAVVTCPGCGNGYDQDYNAAMLMLDRQ |
| | | QQP |
| Cas14 | 153 | MSRVELHRAYKFRLYPTPAQVAELAEWERQLRRLYNLAHSQRLAAMQ |
| ortholog 47 | | RHVRPKSPGVLKSECLSCGAVAVAEIGTDGKAKKTVKHAVGCSVLECR |
| | | SCGGSPDAEGRTAHTAACSFVDYYRQGREMTQLLEEDDQLARVVCSAR |
| | | QETLRDLEKAWQRWHKMPGFGKPHFKKRIDSCRIYFSTPKSWAVDLGY |
| | | LSFTGVASSVGRIKIRQDRVWPGDAKFSSCHVVRDVDEWYAVFPLTFTK |
| | | EIEKPKGGAVGINRGAVHAIADSTGRVVDSPKFYARSLGVIRHRARLLDR |
| | | KVPFGRAVKPSPTKYHGLPKADIDAAAARVNASPGRLVYEARARGSIAA |
| | | AEAHLAALVLPAPRQTSQLPSEGRNRERARRFLALAHQRVRRQREWFL |
| | | HNESAHYAQSYTKIAIEDWSTKEMTSSEPRDAEEMKRVTRARNRSILDV |
| | | GWYELGRQIAYKSEATGAEFAKVDPGLRETETHVPEAIVRERDVDVSG |
| | | MLRGEAGISGTCSRCGGLLRASASGHADAECEVCLHVEVGDVNAAVNV |
| | | LKRAMFPGAAPPSKEKAKVTIGIKGRKKKRAA |
| Cas14 | 154 | MSRVELHRAYKFRLYPTPVQVAELSEWERQLRRLYNLGHEQRLLTLTR |
| ortholog 48 | | HLRPKSPGVLKGECLSCDSTQVQEVGADGRPKTTVRHAEQCPTLACRSC |
| | | GALRDAEGRTAHTVACAFVDYYRQGREMTELLAADDQLARVVCSARQ |
| | | EVLRDLDKAWQRWRKMPGFGKPRFKRRTDSCRIYFSTPKAWKLEGGHL |
| | | SFTGAATTVGAIKMRQDRNWPASVQFSSCHVVRDVDEWYAVFPLTFVA |
| | | EVARPKGGAVGINRGAVHAIADSTGRVVDSPRYYARALGVIRHRARLFD |
| | | RKVPSGHAVKPSPTKYRGLSAIEVDRVARATGFTPGRVVTEALNRGGVA |
| | | YAECALAAIAVLGHGPERPLTSDGRNREKARKFLALAHQRVRRQREWF |
| | | LHNESAHYARTYSKIAIEDWSTKEMTASEPQGEETRRVTRSRNRSILDVG |
| | | WYELGRQLAYKTEATGAEFAQVDPGLKETETNVPKAIADARDVDVSG |
| | | MLRGEAGISGTCSKCGGLLRAPASGHADAECEICLNVEVGDVNAAVNV |
| | | LKRAMFPGDAPPASGEKPKVSIGIKGRQKKKKAA |
| Cas14 | 155 | MEAIATGMSPERRVELGILPGSVELKRAYKFRLYPMKVQQAELSEWERQ |
| ortholog 49 | | LRRLYNLAHEQRLAALLRYRDWDFQKGACPSCRVAVPGVHTAACDHV |
| | | DYFRQAREMTQLLEVDAQLSRVICCARQEVLRDLDKAWQRWRKKLGG |
| | | RPRFKRRTDSCRIYLSTPKHWEIAGRYLRLSGLASSVGEIRIEQDRAFPEG |
| | | ALLSSCSIVRDVDEWYACLPLTFTQPIERAPHRSVGLNRGVVHALADSD |
| | | GRVVDSPKFFERALATVQKRSRDLARKVSGSRNAHKARIKLAKAHQRV |
| | | RRQRAAFLHQESAYYSKGFDLVALEDMSVRKMTATAGEAPEMGRGAQ |
| | | RDLNRGILDVGWYELARQIDYKRLAHGGELLRVDPGQTTPLACVTEEQP |
| | | ARGISSACAVCGIPLARPASGNARMRCTACGSSQVGDVNAAENVLTRAL |
| | | SSAPSGPKSPKASIKIKGRQKRLGTPANRAGEASGGDPPVRGPVEGGTLA |
| | | YVVEPVSESQSDT |
| Cas14 | 156 | MTVRTYKYRAYPTPEQAEALTSWLRFASQLYNAALEHRKNAWGRHDA |
| ortholog 50 | | HGRGFRFWDGDAAPRKKSDPPGRWVYRGGGGAHISKNDQGKLLTEFR |
| | | REHAELLPPGMPALVQHEVLARLERSMAAFFQRATKGQKAGYPRWRSE |
| | | HRYDSLTFGLTSPSKERFDPETGESLGRGKTVGAGTYHNGDLRLTGLGE |
| | | LRILEHRRIPMGAIPKSVIVRRSGKRWFVSIAMEMPSVEPAASGRPAVGL |
| | | DMGVVTWGTAFTADTSAAAALVADLRRMATDPSDCRRLEELEREAAQ |
| | | LSEVLAHCRARGLDPARPRRCPKELTKLYRRSLHRLGELDRACARIRRR |
| | | LQAAHDIAEPVPDEAGSAVLIEGSNAGMRHARRVARTQRRVARRTRAG |
| | | HAHSNRRKKAVQAYARAKERERSARGDHRHKVSRALVRQFEEISVEAL |
| | | DIKQLTVAPEHNPDPQPDLPAHVQRRRNRGELDAAWGAFFAALDYKAA |
| | | DAGGRVARKPAPHTTQECARCGTLVPKPISLRVHRCPACGYTAPRTVNS |
| | | ARNVLQRPLEEPGRAGPSGANGRGVPHAVA |
| Cas14 | 157 | MNCRYRYRIYPTPGQRQSLARLFGCVRVVWNDALFLCRQSEKLPKNSEL |
| ortholog 51 | | QKLCITQAKKTEARGWLGQVSAIPLQQSVADLGVAFKNFFQSRSGKRKG |
| | | KKVNPPRVKRRNNRQGARFTRGGFKVKTSKVYLARIGDIKIKWSRPLPS |
| | | EPSSVTVIKDCAGQYFLSFVVEVKPEIKPPKNPSIGIDLGLKTFASCSNGE |
| | | KIDSPDYSRLYRKLKRCQRRLAKRQRGSKRRERMRVKVAKLNAQIRDK |
| | | RKDFLHKLSTKVVNENQVIALEDLNVGGMLKNRKLSRAISQAGWYEFR |
| | | SLCEGKAEKHNRDFRVISRWEPTSQVCSECGYRWGKIDLSVRSIVCINCG |
| | | VEHDRDDNASVNIEQAGLKVGVGHTHDSKRTGSACKTSNGAVCVEPST |
| | | HREYVQLTLFDW |
| Cas14 | 158 | MKSRWTFRCYPTPEQEQHLARTFGCVRFVWNWALRARTDAFRAGERIG |
| ortholog 52 | | YPATDKALTLLKQQPETVWLNEVSSVCLQQALRDLQVAFSNFFDKRAA |
| | | HPSFKRKEARQSANYTERGFSFDHERRILKLAKIGAIKVKWSRKAIPHPSS |
| | | IRLIRTASGKYFVSLVVETQPAPMPETGESVGVDFGVARLATLSNGERIS |
| | | NPKHGAKWQRRLAFYQKRLARATKGSKRRMRIKRHVARIHEKIGNSRS |
| | | DTLHKLSTDLVTRFDLICVEDLNLRGMVKNHSLARSLHDASIGSAIRMIE |
| | | EKAERYGKNVVKIDRWFPSSKTCSDCGHIVEQLPLNVREWTCPECGTTH |
| | | DRDANAAANILAVGQTVSAHGGTVRRSRAKASERKSQRSANRQGVNR |
| | | A |
| Cas14 | 159 | KEPLNIGKTAKAVFKEIDPTSLNRAANYDASIELNCKECKFKPFKNVKRY |
| ortholog 53 | | EFNFYNNWYRCNPNSCLQSTYKAQVRKVEIGYEKLKNEILTQMQYYPW |
| | | FGRLYQNFFHDERDKMTSLDEIQVIGVQNKVFFNTVEKAWREIIKKRFK |
| | | DNKETMETIPELKHAAGHGKRKLSNKSLLRRRFAFVQKSFKFVDNSDVS |
| | | YRSFSNNIACVLPSRIGVDLGGVISRNPKREYIPQEISFNAFWKQHEGLKK |
| | | GRNIEIQSVQYKGETVKRIEADTGEDKAWGKNRQRRFTSLILKLVPKQG |
| | | GKKVWKYPEKRNEGNYEYFPIPIEFILDSGETSIRFGGDEGEAGKQKHLV |
| | | IPFNDSKATPLASQQTLLENSRFNAEVKSCIGLAIYANYFYGYARNYVISS |
| | | IYHKNSKNGQAITAIYLESIAHNYVKAIERQLQNLLLNLRDFSFMESHKK |
| | | ELKKYFGGDLEGTGGAQKRREKEEKIEKEIEQSYLPRLIRLSLTKMVTKQ |
| | | VEM |
| Cas14 | 160 | ELIVNENKDPLNIGKTAKAVFKEIDPTSINRAANYDASIELACKECKFKPF |
| ortholog 54 | | NNTKRHDFSFYSNWHRCSPNSCLQSTYRAKIRKTEIGYEKLKNEILNQM |
| | | QYYPWFGRLYQNFFNDQRDKMTSLDEIQVTGVQNKIFFNTVEKAWREII |
| | | KKRFRDNKETMRTIPDLKNKSGHGSRKLSNKSLLRRRFAFAQKSFKLVD |
| | | NSDVSYRAFSNNVACVLPSKIGVDIGGIINKDLKREYIPQEITFNVFWKQH |
| | | DGLKKGRNIEIHSVQYKGEIVKRIEADTGEDKAWGKNRQRRFTSLILKIT |
| | | PKQGGKKIWKFPEKKNASDYEYFPIPIEFILDNGDASIKFGGEEGEVGKQ |
| | | KHLLIPFNDSKATPLSSKQMLLETSRFNAEVKSTIGLALYANYFVSYARN |
| | | YVIKSTYHKNSKKGQIVTEIYLESISQNFVRAIQRQLQSLMLNLKDWGFM |
| | | QTHKKELKKYFGSDLEGSKGGQKRREKEEKIEKEIEASYLPRLIRLSLTKS |
| | | VTKAEEM |
| Cas14 | 161 | PEEKTSKLKPNSINLAANYDANEKFNCKECKFHPFKNKKRYEFNFYNNL |
| ortholog 55 | | HGCKSCTKSTNNPAVKRIEIGYQKLKFEIKNQMEAYPWFGRLRINFYSDE |
| | | KRKMSELNEMQVTGVKNKIFFDAIECAWREILKKRFRESKETLITIPKLK |
| | | NKAGHGARKHRNKKLLIRRRAFMKKNFHFLDNDSISYRSFANNIACVLP |
| | | SKVGVDIGGIISPDVGKDIKPVDISLNLMWASKEGIKSGRKVEIYSTQYD |
| | | GNMVKKIEAETGEDKSWGKNRKRRQTSLLLSIPKPSKQVQEFDFKEWPR |
| | | YKDIEKKVQWRGFPIKIIFDSNHNSIEFGTYQGGKQKVLPIPFNDSKTTPL |
| | | GSKMNKLEKLRFNSKIKSRLGSAIAANKFLEAARTYCVDSLYHEVSSAN |
| | | AIGKGKIFIEYYLEILSQNYIEAAQKQLQRFIESIEQWFVADPFQGRLKQY |
| | | FKDDLKRAKCFLCANREVQTTCYAAVKLHKSCAEKVKDKNKELAIKER |
| | | NNKEDAVIKEVEASNYPRVIRLKLTKTITNKAM |
| Cas14 | 162 | SESENKIIEQYYAFLYSFRDKYEKPEFKNRGDIKRKLQNKWEDFLKEQNL |
| ortholog 56 | | KNDKKLSNYIFSNRNFRRSYDREEENEEGIDEKKSKPKRINCFEKEKNLK |
| | | DQYDKDAINASANKDGAQKWGCFECIFFPMYKIESGDPNKRIIINKTRFK |
| | | LFDFYLNLKGCKSCLRSTYHPYRSNVYIESNYDKLKREIGNFLQQKNIFQ |
| | | RMRKAKVSEGKYLTNLDEYRLSCVAMHFKNRWLFFDSIQKVLRETIKQ |
| | | RLKQMRESYDEQAKTKRSKGHGRAKYEDQVRMIRRRAYSAQAHKLLD |
| | | NGYITLFDYDDKEINKVCLTAINQEGFDIGGYLNSDIDNVMPPIEISFHLK |
| | | WKYNEPILNIESPFSKAKISDYLRKIREDLNLERGKEGKARSKKNVRRKV |
| | | LASKGEDGYKKIFTDFFSKWKEELEGNAMERVLSQSSGDIQWSKKKRIH |
| | | YTTLVLNINLLDKKGVGNLKYYEIAEKTKILSFDKNENKFWPITIQVLLD |
| | | GYEIGTEYDEIKQLNEKTSKQFTIYDPNTKIIKIPFTDSKAVPLGMLGINIA |
| | | TLKTVKKTERDIKVSKIFKGGLNSKIVSKIGKGIYAGYFPTVDKEILEEVE |
| | | EDTLDNEFSSKSQRNIFLKSIIKNYDKMLKEQLFDFYSFLVRNDLGVRFLT |
| | | DRELQNIEDESFNLEKRFFETDRDRIARWFDNTNTDDGKEKFKKLANEIV |
| | | DSYKPRLIRLPVVRVIKRIQPVKQREM |
| Cas14 | 163 | KYSTRDFSELNEIQVTACKQDEFFKVIQNAWREIIKKRFLENRENFIEKKI |
| ortholog 57 | | FKNKKGRGKRQESDKTIQRNRASVMKNFQLIENEKIILRAPSGHVACVFP |
| | | VKVGLDIGGFKTDDLEKNIFPPRTITINVFWKNRDRQRKGRKLEVWGIK |
| | | ARTKLIEKVHKWDKLEEVKKKRLKSLEQKQEKSLDNWSEVNNDSFYKV |
| | | QIDELQEKIDKSLKGRTMNKILDNKAKESKEAEGLYIEWEKDFEGEMLR |
| | | RIEASTGGEEKWGKRRQRRHTSLLLDIKNNSRGSKEIINFYSYAKQGKKE |
| | | KKIEFFPFPLTITLDAEEESPLNIKSIPIEDKNATSKYFSIPFTETRATPLSILG |
| | | DRVQKFKTKNISGAIKRNLGSSISSCKIVQNAETSAKSILSLPNVKEDNNM |
| | | EIFINTMSKNYFRAMMKQMESFIFEMEPKTLIDPYKEKAIKWFEVAASSR |
| | | AKRKLKKLSKADIKKSELLLSNTEEFEKEKQEKLEALEKEIEEFYLPRIVR |
| | | LQLTKTILETPVM |
| Cas14 | 164 | KKLQLLGHKILLKEYDPNAVNAAANFETSTAELCGQCKMKPFKNKRRF |
| ortholog 58 | | QYTFGKNYHGCLSCIQNVYYAKKRIVQIAKEELKHQLTDSIASIPYKYTS |
| | | LFSNTNSIDELYILKQERAAFFSNTNSIDELYITGIENNIAFKVISAIWDEIIK |
| | | KRRQRYAESLTDTGTVKANRGHGGTAYKSNTRQEKIRALQKQTLHMVT |
| | | NPYISLARYKNNYIVATLPRTIGMHIGAIKDRDPQKKLSDYAINFNVFWS |
| | | DDRQLIELSTVQYTGDMVRKIEAETGENNKWGENMKRTKTSLLLEILTK |
| | | KTTDELTFKDWAFSTKKEIDSVTKKTYQGFPIGIIFEGNESSVKFGSQNYF |
| | | PLPFDAKITPPTAEGFRLDWLRKGSFSSQMKTSYGLAIYSNKVTNAIPAY |
| | | VIKNMFYKIARAENGKQIKAKFLKKYLDIAGNNYVPFIIMQHYRVLDTFE |
| | | EMPISQPKVIRLSLTKTQHIIIKKDKTDSKM |
| Cas14 | 165 | NTSNLINLGKKAINISANYDANLEVGCKNCKFLSSNGNFPRQTNVKEGC |
| ortholog 59 | | HSCEKSTYEPSIYLVKIGERKAKYDVLDSLKKFTFQSLKYQSKKSMKSRN |
| | | KKPKELKEFVIFANKNKAFDVIQKSYNHLILQIKKEINRMNSKKRKKNH |
| | | KRRLFRDREKQLNKLRLIESSNLFLPRENKGNNHVFTYVAIHSVGRDIGV |
| | | IGSYDEKLNFETELTYQLYFNDDKRLLYAYKPKQNKIIKIKEKLWNLRKE |
| | | KEPLDLEYEKPLNKSITFSIKNDNLFKVSKDLMLRRAKFNIQGKEKLSKE |
| | | ERKINRDLIKIKGLVNSMSYGRFDELKKEKNIWSPHIYREVRQKEIKPCLI |
| | | KNGDRIEIFEQLKKKMERLRRFREKRQKKISKDLIFAERIAYNFHTKSIKN |
| | | TSNKINIDQEAKRGKASYMRKRIGYETFKNKYCEQCLSKGNVYRNVQK |
| | | GCSCFENPFDWIKKGDENLLPKKNEDLRVKGAFRDEALEKQIVKIAFNIA |
| | | KGYEDFYDNLGESTEKDLKLKFKVGTTINEQESLKL |
| Cas14 | 166 | TSNPIKLGKKAINISANYDSNLQIGCKNCKFLSYNGNFPRQTNVKEGCHS |
| ortholog 60 | | CEKSTYEPPVYTVRIGERRSKYDVLDSLKKFIFLSLKYRQSKKMKTRSKG |
| | | IRGLEEFVISANLKKAMDVIQKSYRHLILNIKNEIVRMNGKKRNKNHKRL |
| | | LFRDREKQLNKLRLIEGSSFFKPPTVKGDNSIFTCVAIHNIGRDIGIAGDYF |
| | | DKLEPKIELTYQLYYEYNPKKESEINKRLLYAYKPKQNKIIEIKEKLWNL |
| | | RKEKSPLDLEYEKPLTKSITFLVKRDGVFRISKDLMLRKAKFIIQGKEKLS |
| | | KEERKINRDLIKIKSNIISLTYGRFDELKKDKTIWSPHIFRDVKQGKITPCIE |
| | | RKGDRMDIFQQLRKKSERLRENRKKRQKKISKDLIFAERIAYNFHTKSIK |
| | | NTSNLINIKHEAKRGKASYMRKRIGNETFRIKYCEQCFPKNNVYKNVQK |
| | | GCSCFEDPFEYIKKGNEDLIPNKNQDLKAKGAFRDDALEKQIIKVAFNIA |
| | | KGYEDFYENLKKTTEKDIRLKFKVGTIISEEM |
| Cas14 | 167 | NNSINLSKKAINISANYDANLQVRCKNCKFLSSNGNFPRQTDVKEGCHS |
| ortholog 61 | | CEKSTYEPPVYDVKIGEIKAKYEVLDSLKKFTFQSLKYQLSKSMKFRSKK |
| | | IKELKEFVIFAKESKALNVINRSYKHLILNIKNDINRMNSKKRIKNHKGRL |
| | | FLDRQKQLSKLKLIEGSSFFVPAKNVGNKSVFTCVAIHSIGRDIGIAGLYD |
| | | SFTKPVNEITYQIFFSGERRLLYAYKPKQLKILSIKENLWSLKNEKKPLDL |
| | | LYEKPLGKNLNFNVKGGDLFRVSKDLMIRNAKFNVHGRQRLSDEERLIN |
| | | RNFIKIKGEVVSLSYGRFEELKKDRKLWSPHIFKDVRQNKIKPCLVMQG |
| | | QRIDIFEQLKRKLELLKKIRKSRQKKLSKDLIFGERIAYNFHTKSIKNTSN |
| | | KINIDSDAKRGRASYMRKRIGNETFKLKYCDVCFPKANVYRRVQNGCSC |
| | | SENPYNYIKKGDKDLLPKKDEGLAIKGAFRDEKLNKQIIKVAFNIAKGYE |
| | | DFYDDLKKRTEKDVDLKFKIGTTVLDQKPMEIFDGIVITWL |
| Cas14 | 168 | LLTTVVETNNLAKKAINVAANFDANIDRQYYRCTPNLCRFIAQSPRETKE |
| ortholog 62 | | KDAGCSSCTQSTYDPKVYVIKIGKLLAKYEILKSLKRFLFMNRYFKQKK |
| | | TERAQQKQKIGTELNEMSIFAKATNAMEVIKRATKHCTYDIIPETKSLQM |
| | | LKRRRHRVKVRSLLKILKERRMKIKKIPNTFIEIPKQAKKNKSDYYVAAA |
| | | LKSCGIDVGLCGAYEKNAEVEAEYTYQLYYEYKGNSSTKRILYCYNNPQ |
| | | KNIREFWEAFYIQGSKSHVNTPGTIRLKMEKFLSPITIESEALDFRVWNSD |
| | | LKIRNGQYGFIKKRSLGKEAREIKKGMGDIKRKIGNLTYGKSPSELKSIH |
| | | VYRTERENPKKPRAARKKEDNFMEIFEMQRKKDYEVNKKRRKEATDA |
| | | AKIMDFAEEPIRHYHTNNLKAVRRIDMNEQVERKKTSVFLKRIMQNGYR |
| | | GNYCRKCIKAPEGSNRDENVLEKNEGCLDCIGSEFIWKKSSKEKKGLWH |
| | | TNRLLRRIRLQCFTTAKAYENFYNDLFEKKESSLDIIKLKVSITTKSM |
| Cas14 | 169 | ASTMNLAKQAINFAANYDSNLEIGCKGCKFMSTWSKKSNPKFYPRQNN |
| ortholog 63 | | QANKCHSCTYSTGEPEVPIIEIGERAAKYKIFTALKKFVFMSVAYKERRR |
| | | QRFKSKKPKELKELAICSNREKAMEVIQKSVVHCYGDVKQEIPRIRKIKV |
| | | LKNHKGRLFYKQKRSKIKIAKLEKGSFFKTFIPKVHNNGCHSCHEASLNK |
| | | PILVTTALNTIGADIGLINDYSTIAPTETDISWQVYYEFIPNGDSEAVKKRL |
| | | LYFYKPKGALIKSIRDKYFKKGHENAVNTGFFKYQGKIVKGPIKFVNNEL |
| | | DFARKPDLKSMKIKRAGFAIPSAKRLSKEDREINRESIKIKNKIYSLSYGR |
| | | KKTLSDKDIIKHLYRPVRQKGVKPLEYRKAPDGFLEFFYSLKRKERRLRK |
| | | QKEKRQKDMSEIIDAADEFAWHRHTGSIKKTTNHINFKSEVKRGKVPIM |
| | | KKRIANDSFNTRHCGKCVKQGNAINKYYIEKQKNCFDCNSIEFKWEKAA |
| | | LEKKGAFKLNKRLQYIVKACFNVAKAYESFYEDFRKGEEESLDLKFKIG |
| | | TTTTLKQYPQNKARAM |
| Cas14 | 170 | HSHNLMLTKLGKQAINFAANYDANLEIGCKNCKFLSYSPKQANPKKYPR |
| ortholog 64 | | QTDVHEDGNIACHSCMQSTKEPPVYIVPIGERKSKYEILTSLNKFTFLALK |
| | | YKEKKRQAFRAKKPKELQELAIAFNKEKAIKVIDKSIQHLILNIKPEIARIQ |
| | | RQKRLKNRKGKLLYLHKRYAIKMGLIKNGKYFKVGSPKKDGKKLLVLC |
| | | ALNTIGRDIGIIGNIEENNRSETEITYQLYFDCLDANPNELRIKEIEYNRLK |
| | | SYERKIKRLVYAYKPKQTKILEIRSKFFSKGHENKVNTGSFNFENPLNKSI |
| | | SIKVKNSAFDFKIGAPFIMLRNGKFHIPTKKRLSKEEREINRTLSKIKGRVF |
| | | RLTYGRNISEQGSKSLHIYRKERQHPKLSLEIRKQPDSFIDEFEKLRLKQN |
| | | FISKLKKQRQKKLADLLQFADRIAYNYHTSSLEKTSNFINYKPEVKRGRT |
| | | SYIKKRIGNEGFEKLYCETCIKSNDKENAYAVEKEELCFVCKAKPFTWK |
| | | KTNKDKLGIFKYPSRIKDFIRAAFTVAKSYNDFYENLKKKDLKNEIFLKF |
| | | KIGLILSHEKKNHISIAKSVAEDERISGKSIKNILNKSIKLEKNCYSCFFHKE |
| | | DM |
| Cas14 | 171 | SLERVIDKRNLAKKAINIAANFDANINKGFYRCETNQCMFIAQKPRKTNN |
| ortholog 65 | | TGCSSCLQSTYDPVIYVVKVGEMLAKYEILKSLKRFVFMNRSFKQKKTE |
| | | KAKQKERIGGELNEMSIFANAALAMGVIKRAIRHCHVDIRPEINRLSELK |
| | | KTKHRVAAKSLVKIVKQRKTKWKGIPNSFIQIPQKARNKDADFYVASAL |
| | | KSGGIDIGLCGTYDKKPHADPRWTYQLYFDTEDESEKRLLYCYNDPQAK |
| | | IRDFWKTFYERGNPSMVNSPGTIEFRMEGFFEKMTPISIESKDFDFRVWN |
| | | KDLLIRRGLYEIKKRKNLNRKAREIKKAMGSVKRVLANMTYGKSPTDK |
| | | KSIPVYRVEREKPKKPRAVRKEENELADKLENYRREDFLIRNRRKREATE |
| | | IAKIIDAAEPPIRHYHTNHLRAVKRIDLSKPVARKNTSVFLKRIMQNGYR |
| | | GNYCKKCIKGNIDPNKDECRLEDIKKCICCEGTQNIWAKKEKLYTGRINV |
| | | LNKRIKQMKLECFNVAKAYENFYDNLAALKEGDLKVLKLKVSIPALNPE |
| | | ASDPEEDM |
| Cas14 | 172 | NASINLGKRAINLSANYDSNLVIGCKNCKFLSFNGNFPRQTNVREGCHSC |
| ortholog 66 | | DKSTYAPEVYIVKIGERKAKYDVLDSLKKFTFQSLKYQIKKSMRERSKK |
| | | PKELLEFVIFANKDKAFNVIQKSYEHLILNIKQEINRMNGKKRIKNHKKR |
| | | LFKDREKQLNKLRLIGSSSLFFPRENKGDKDLFTYVAIHSVGRDIGVAGS |
| | | YESHIEPISDLTYQLFINNEKRLLYAYKPKQNKIIELKENLWNLKKEKKPL |
| | | DLEFTKPLEKSITFSVKNDKLFKVSKDLMLRQAKFNIQGKEKLSKEERQI |
| | | NRDFSKIKSNVISLSYGRFEELKKEKNIWSPHIYREVKQKEIKPCIVRKGD |
| | | RIELFEQLKRKMDKLKKFRKERQKKISKDLNFAERIAYNFHTKSIKNTSN |
| | | KINIDQEAKRGKASYMRKRIGNESFRKKYCEQCFSVGNVYHNVQNGCS |
| | | CFDNPIELIKKGDEGLIPKGKEDRKYKGALRDDNLQMQIIRVAFNIAKGY |
| | | EDFYNNLKEKTEKDLKLKFKIGTTISTQESNNKEM |
| Cas14 | 173 | SNLIKLGKQAINFAANYDANLEVGCKNCKFLSSTNKYPRQTNVHLDNK |
| ortholog 67 | | MACRSCNQSTMEPAIYIVRIGEKKAKYDIYNSLTKFNFQSLKYKAKRSQ |
| | | RFKPKQPKELQELSIAVRKEKALDIIQKSIDHLIQDIRPEIPRIKQQKRYKN |
| | | HVGKLFYLQKRRKNKLNLIGKGSFFKVFSPKEKKNELLVICALTNIGRDI |
| | | GLIGNYNTIINPLFEVTYQLYYDYIPKKNNKNVQRRLLYAYKSKNEKILK |
| | | LKEAFFKRGHENAVNLGSFSYEKPLEKSLTLKIKNDKDDFQVSPSLRIRT |
| | | GRFFVPSKRNLSRQEREINRRLVKIKSKIKNMTYGKFETARDKQSVHIFR |
| | | LERQKEKLPLQFRKDEKEFMEEFQKLKRRTNSLKKLRKSRQKKLADLLQ |
| | | LSEKVVYNNHTGTLKKTSNFLNFSSSVKRGKTAYIKELLGQEGFETLYCS |
| | | NCINKGQKTRYNIETKEKCFSCKDVPFVWKKKSTDKDRKGAFLFPAKLK |
| | | DVIKATFTVAKAYEDFYDNLKSIDEKKPYIKFKIGLILAHVRHEHKARAK |
| | | EEAGQKNIYNKPIKIDKNCKECFFFKEEAM |
| Cas14 | 174 | NTTRKKFRKRTGFPQSDNIKLAYCSAIVRAANLDADIQKKHNQCNPNLC |
| ortholog 68 | | VGIKSNEQSRKYEHSDRQALLCYACNQSTGAPKVDYIQIGEIGAKYKILQ |
| | | MVNAYDFLSLAYNLTKLRNGKSRGHQRMSQLDEVVIVADYEKATEVIK |
| | | RSINHLLDDIRGQLSKLKKRTQNEHITEHKQSKIRRKLRKLSRLLKRRRW |
| | | KWGTIPNPYLKNWVFTKKDPELVTVALLHKLGRDIGLVNRSKRRSKQK |
| | | LLPKVGFQLYYKWESPSLNNIKKSKAKKLPKRLLIPYKNVKLFDNKQKL |
| | | ENAIKSLLESYQKTIKVEFDQFFQNRTEEIIAEEQQTLERGLLKQLEKKKN |
| | | EFASQKKALKEEKKKIKEPRKAKLLMEESRSLGFLMANVSYALFNTTIE |
| | | DLYKKSNVVSGCIPQEPVVVFPADIQNKGSLAKILFAPKDGFRIKFSGQH |
| | | LTIRTAKFKIRGKEIKILTKTKREILKNIEKLRRVWYREQHYKLKLFGKEV |
| | | SAKPRFLDKRKTSIERRDPNKLADQTDDRQAELRNKEYELRHKQHKMA |
| | | ERLDNIDTNAQNLQTLSFWVGEADKPPKLDEKDARGFGVRTCISAWKW |
| | | FMEDLLKKQEEDPLLKLKLSIM |
| Cas14 | 175 | PKKPKFQKRTGFPQPDNLRKEYCLAIVRAANLDADFEKKCTKCEGIKTN |
| ortholog 69 | | KKGNIVKGRTYNSADKDNLLCYACNISTGAPAVDYVFVGALEAKYKIL |
| | | QMVKAYDFHSLAYNLAKLWKGRGRGHQRMGGLNEVVIVSNNEKALD |
| | | VIEKSLNHFHDEIRGELSRLKAKFQNEHLHVHKESKLRRKLRKISRLLKR |
| | | RRWKWDVIPNSYLRNFTFTKTRPDFISVALLHRVGRDIGLVTKTKIPKPT |
| | | DLLPQFGFQIYYTWDEPKLNKLKKSRLRSEPKRLLVPYKKIELYKNKSVL |
| | | EEAIRHLAEVYTEDLTICFKDFFETQKRKFVSKEKESLKRELLKELTKLK |
| | | KDFSERKTALKRDRKEIKEPKKAKLLMEESRSLGFLAANTSYALFNLIAA |
| | | DLYTKSKKACSTKLPRQLSTILPLEIKEHKSTTSLAIKPEEGFKIRFSNTHL |
| | | SIRTPKFKMKGADIKALTKRKREILKNATKLEKSWYGLKHYKLKLYGKE |
| | | VAAKPRFLDKRNPSIDRRDPKELMEQIENRRNEVKDLEYEIRKGQHQMA |
| | | KRLDNVDTNAQNLQTKSFWVGEADKPPELDSMEAKKLGLRTCISAWK |
| | | WFMKDLVLLQEKSPNLKLKLSLTEM |
| Cas14 | 176 | KFSKRQEGFLIPDNIDLYKCLAIVRSANLDADVQGHKSCYGVKKNGTYR |
| ortholog 70 | | VKQNGKKGVKEKGRKYVFDLIAFKGNIEKIPHEAIEEKDQGRVIVLGKF |
| | | NYKLILNIEKNHNDRASLEIKNKIKKLVQISSLETGEFLSDLLSGKIGIDEV |
| | | YGIIEPDVFSGKELVCKACQQSTYAPLVEYMPVGELDAKYKILSAIKGYD |
| | | FLSLAYNLSRNRANKKRGHQKLGGGELSEVVISANYDKALNVIKRSINH |
| | | YHVEIKPEISKLKKKMQNEPLKVMKQARIRRELHQLSRKVKRLKWKWG |
| | | MIPNPELQNIIFEKKEKDFVSYALLHTLGRDIGLFKDTSMLQVPNISDYGF |
| | | QIYYSWEDPKLNSIKKIKDLPKRLLIPYKRLDFYIDTILVAKVIKNLIELYR |
| | | KSYVYETFGEEYGYAKKAEDILFDWDSINLSEGIEQKIQKIKDEFSDLLYE |
| | | ARESKRQNFVESFENILGLYDKNFASDRNSYQEKIQSMIIKKQQENIEQK |
| | | LKREFKEVIERGFEGMDQNKKYYKVLSPNIKGGLLYTDTNNLGFFRSHL |
| | | AFMLLSKISDDLYRKNNLVSKGGNKGILDQTPETMLTLEFGKSNLPNISI |
| | | KRKFFNIKYNSSWIGIRKPKFSIKGAVIREITKKVRDEQRLIKSLEGVWHK |
| | | STHFKRWGKPRFNLPRHPDREKNNDDNLMESITSRREQIQLLLREKQKQ |
| | | QEKMAGRLDKIDKEIQNLQTANFQIKQIDKKPALTEKSEGKQSVRNALS |
| | | AWKWFMEDLIKYQKRTPILQLKLAKM |
| Cas14 | 177 | KFSKRQEGFVIPENIGLYKCLAIVRSANLDADVQGHVSCYGVKKNGTYV |
| ortholog 71 | | LKQNGKKSIREKGRKYASDLVAFKGDIEKIPFEVIEEKKKEQSIVLGKFN |
| | | YKLVLDVMKGEKDRASLTMKNKSKKLVQVSSLGTDEFLLTLLNEKFGIE |
| | | EIYGIIEPEVFSGKKLVCKACQQSTYAPLVEYMPVGELDSKYKILSAIKGY |
| | | DFLSLAYNLARHRSNKKRGHQKLGGGELSEVVISANNAKALNVIKRSLN |
| | | HYYSEIKPEISKLRKKMQNEPLKVGKQARMRRELHQLSRKVKRLKWKW |
| | | GKIPNLELQNITFKESDRDFISYALLHTLGRDIGMFNKTEIKMPSNILGYG |
| | | FQIYYDWEEPKLNTIKKSKNTPKRILIPYKKLDFYNDSILVARAIKELVGL |
| | | FQESYEWEIFGNEYNYAKEAEVELIKLDEESINGNVEKKLQRIKENFSNL |
| | | LEKAREKKRQNFIESFESIARLYDESFTADRNEYQREIQSFIIEKQKQSIEK |
| | | KLKNEFKKIVEKKFNEQEQGKKHYRVLNPTIINEFLPKDKNNLGFLRSKI |
| | | AFILLSKISDDLYKKSNAVSKGGEKGIIKQQPETILDLEFSKSKLPSINIKK |
| | | KLFNIKYTSSWLGIRKPKFNIKGAKIREITRRVRDVQRTLKSAESSWYAST |
| | | HFRRWGFPRFNQPRHPDKEKKSDDRLIESITLLREQIQILLREKQKGQKE |
| | | MAGRLDDVDKKIQNLQTANFQIKQTGDKPALTEKSAGKQSFRNALSAW |
| | | KWFMENLLKYQNKTPDLKLKIARTVM |
| Cas14 | 178 | KWIEPNNIDFNKCLAITRSANLDADVQGHKMCYGIKTNGTYKAIGKINK |
| ortholog 72 | | KHNTGIIEKRRTYVYDLIVTKEKNEKIVKKTDFMAIDEEIEFDEKKEKLL |
| | | KKYIKAEVLGTGELIRKDLNDGEKFDDLCSIEEPQAFRRSELVCKACNQS |
| | | TYASDIRYIPIGEIEAKYKILKAIKGYDFLSLKYNLGRLRDSKKRGHQKM |
| | | GQGELKEFVICANKEKALDVIKRSLNHYLNEVKDEISRLNKKMQNEPLK |
| | | VNDQARWRRELNQISRRLKRLKWKWGEIPNPELKNLIFKSSRPEFVSYA |
| | | LIHTLGRDIGLINETELKPNNIQEYGFQIYYKWEDPELNHIKKVKNIPKRFI |
| | | IPYKNLDLFGKYTILSRAIEGILKLYSSSFQYKSFKDPNLFAKEGEKKITNE |
| | | DFELGYDEKIKKIKDDFKSYKKALLEKKKNTLEDSLNSILSVYEQSLLTE |
| | | QINNVKKWKEGLLKSKESIHKQKKIENIEDIISRIEELKNVEGWIRTKERDI |
| | | VNKEETNLKREIKKELKDSYYEEVRKDFSDLKKGEESEKKPFREEPKPIVI |
| | | KDYIKFDVLPGENSALGFFLSHLSFNLFDSIQYELFEKSRLSSSKHPQIPETI |
| | | LDL |
| Cas14 | 179 | FRKFVKRSGAPQPDNLNKYKCIAIVRAANLDADIMSNESSNCVMCKGIK |
| ortholog 73 | | MNKRKTAKGAAKTTELGRVYAGQSGNLLCTACTKSTMGPLVDYVPIGR |
| | | IRAKYTILRAVKEYDFLSLAYNLARTRVSKKGGRQKMHSLSELVIAAEY |
| | | EIAWNIIKSSVIHYHQETKEEISGLRKKLQAEHIHKNKEARIRREMHQISR |
| | | RIKRLKWKWHMIPNSELHNFLFKQQDPSFVAVALLHTLGRDIGMINKPK |
| | | GSAKREFIPEYGFQIYYKWMNPKLNDINKQKYRKMPKRSLIPYKNLNVF |
| | | GDRELIENAMHKLLKLYDENLEVKGSKFFKTRVVAISSKESEKLKRDLL |
| | | WKGELAKIKKDFNADKNKMQELFKEVKEPKKANALMKQSRNMGFLLQ |
| | | NISYGALGLLANRMYEASAKQSKGDATKQPSIVIPLEMEFGNAFPKLLLR |
| | | SGKFAMNVSSPWLTIRKPKFVIKGNKIKNITKLMKDEKAKLKRLETSYH |
| | | RATHFRPTLRGSIDWDSPYFSSPKQPNTHRRSPDRLSADITEYRGRLKSVE |
| | | AELREGQRAMAKKLDSVDMTASNLQTSNFQLEKGEDPRLTEIDEKGRSI |
| | | RNCISSWKKFMEDLMKAQEANPVIKIKIALKDESSVLSEDSM |
| Cas14 | 180 | KFHPENLNKSYCLAIVRAANLDADIQGHINCIGIKSNKSDRNYENKLESL |
| ortholog 74 | | QNVELLCKACTKSTYKPNINSVPVGEKKAKYSILSEIKKYDFNSLVYNLK |
| | | KYRKGKSRGHQKLNELRELVITSEYKKALDVINKSVNHYLVNIKNKMS |
| | | KLKKILQNEHIHVGTLARIRRERNRISRKLDHYRKKWKFVPNKILKNYVF |
| | | KNQSPDFVSVALLHKLGRDIGLITKTAILQKSFPEYSLQLYYKYDTPKLN |
| | | YLKKSKFKSLPKRILISYKYPKFDINSNYIEESIDKLLKLYEESPIYKNNSKI |
| | | IEFFKKSEDNLIKSENDSLKRGIMKEFEKVTKNFSSKKKKLKEELKLKNE |
| | | DKNSKMLAKVSRPIGFLKAYLSYMLFNIISNRIFEFSRKSSGRIPQLPSCIIN |
| | | LGNQFENFKNELQDSNIGSKKNYKYFCNLLLKSSGFNISYEEEHLSIKTPN |
| | | FFINGRKLKEITSEKKKIRKENEQLIKQWKKLTFFKPSNLNGKKTSDKIRF |
| | | KSPNNPDIERKSEDNIVENIAKVKYKLEDLLSEQRKEFNKLAKKHDGVD |
| | | VEAQCLQTKSFWIDSNSPIKKSLEKKNEKVSVKKKMKAIRSCISAWKWF |
| | | MADLIEAQKETPMIKLKLALM |
| Cas14 | 181 | TTLVPSHLAGIEVMDETTSRNEDMIQKETSRSNEDENYLGVKNKCGINV |
| ortholog 75 | | HKSGRGSSKHEPNMPPEKSGEGQMPKQDSTEMQQRFDESVTGETQVSA |
| | | GATASIKTDARANSGPRVGTARALIVKASNLDRDIKLGCKPCEYIRSELP |
| | | MGKKNGCNHCEKSSDIASVPKVESGFRKAKYELVRRFESFAADSISRHL |
| | | GKEQARTRGKRGKKDKKEQMGKVNLDEIAILKNESLIEYTENQILDARS |
| | | NRIKEWLRSLRLRLRTRNKGLKKSKSIRRQLITLRRDYRKWIKPNPYRPD |
| | | EDPNENSLRLHTKLGVDIGVQGGDNKRMNSDDYETSFSITWRDTATRKI |
| | | CFTKPKGLLPRHMKFKLRGYPELILYNEELRIQDSQKFPLVDWERIPIFKL |
| | | RGVSLGKKKVKALNRITEAPRLVVAKRIQVNIESKKKKVLTRYVYNDKS |
| | | INGRLVKAEDSNKDPLLEFKKQAEEINSDAKYYENQEIAKNYLWGCEGL |
| | | HKNLLEEQTKNPYLAFKYGFLNIV |
| Cas14 | 182 | LDFKRTCSQELVLLPEIEGLKLSGTQGVTSLAKKLINKAANVDRDESYGC |
| ortholog 76 | | HHCIHTRTSLSKPVKKDCNSCNQSTNHPAVPITLKGYKIAFYELWHRFTS |
| | | WAVDSISKALHRNKVMGKVNLDEYAVVDNSHIVCYAVRKCYEKRQRS |
| | | VRLHKRAYRCRAKHYNKSQPKVGRIYKKSKRRNARNLKKEAKRYFQP |
| | | NEITNGSSDALFYKIGVDLGIAKGTPETEVKVDVSICFQVYYGDARRVLR |
| | | VRKMDELQSFHLDYTGKLKLKGIGNKDTFTIAKRNESLKWGSTKYEVSR |
| | | AHKKFKPFGKKGSVKRKCNDYFRSIASWSCEAASQRAQSNLKNAFPYQ |
| | | KALVKCYKNLDYKGVKKNDMWYRLCSNRIFRYSRIAEDIAQYQSDKGK |
| | | AKFEFVILAQSVAEYDISAIM |
| Cas14 | 183 | VFLTDDKRKTALRKIRSAFRKTAEIALVRAQEADSLDRQAKKLTIETVSF |
| ortholog 77 | | GAPGAKNAFIGSLQGYNWNSHRANVPSSGSAKDVFRITELGLGIPQSAH |
| | | EASIGKSFELVGNVVRYTANLLSKGYKKGAVNKGAKQQREIKGKEQLSF |
| | | DLISNGPISGDKLINGQKDALAWWLIDKMGFHIGLAMEPLSSPNTYGITL |
| | | QAFWKRHTAPRRYSRGVIRQWQLPFGRQLAPLIHNFFRKKGASIPIVLTN |
| | | ASKKLAGKGVLLEQTALVDPKKWWQVKEQVTGPLSNIWERSVPLVLYT |
| | | ATFTHKHGAAHKRPLTLKVIRISSGSVFLLPLSKVTPGKLVRAWMPDINI |
| | | LRDGRPDEAAYKGPDLIRARERSFPLAYTCVTQIADEWQKRALESNRDSI |
| | | TPLEAKLVTGSDLLQIHSTVQQAVEQGIGGRISSPIQELLAKDALQLVLQ |
| | | QLFMTVDLLRIQWQLKQEVADGNTSEKAVGWAIRISNIHKDAYKTAIEP |
| | | CTSALKQAWNPLSGFEERTFQLDASIVRKRSTAKTPDDELVIVLRQQAAE |
| | | MTVAVTQSVSKELMELAVRHSATLHLLVGEVASKQLSRSADKDRGAM |
| | | DHWKLLSQSM |
| Cas14 | 184 | EDLLQKALNTATNVAAIERHSCISCLFTESEIDVKYKTPDKIGQNTAGCQ |
| ortholog 78 | | SCTFRVGYSGNSHTLPMGNRIALDKLRETIQRYAWHSLLFNVPPAPTSKR |
| | | VRAISELRVAAGRERLFTVITFVQTNILSKLQKRYAANWTPKSQERLSRL |
| | | REEGQHILSLLESGSWQQKEVVREDQDLIVCSALTKPGLSIGAFCRPKYL |
| | | KPAKHALVLRLIFVEQWPGQIWGQSKRTRRMRRRKDVERVYDISVQAW |
| | | ALKGKETRISECIDTMRRHQQAYIGVLPFLILSGSTVRGKGDCPILKEITR |
| | | MRYCPNNEGLIPLGIFYRGSANKLLRVVKGSSFTLPMWQNIETLPHPEPF |
| | | SPEGWTATGALYEKNLAYWSALNEAVDWYTGQILSSGLQYPNQNEFLA |
| | | RLQNVIDSIPRKWFRPQGLKNLKPNGQEDIVPNEFVIPQNAIRAHHVIEW |
| | | YHKTNDLVAKTLLGWGSQTTLNQTRPQGDLRFTYTRYYFREKEVPEV |
| Cas14 | 185 | VPKKKLMRELAKKAVFEAIFNDPIPGSFGCKRCTLIDGARVTDAIEKKQG |
| ortholog 79 | | AKRCAGCEPCTFHTLYDSVKHALPAATGCDRTAIDTGLWEILTALRSYN |
| | | WMSFRRNAVSDASQKQVWSIEELAIWADKERALRVILSALTHTIGKLKN |
| | | GFSRDGVWKGGKQLYENLAQKDLAKGLFANGEIFGKELVEADHDMLA |
| | | WTIVPNHQFHIGLIRGNWKPAAVEASTAFDARWLTNGAPLRDTRTHGH |
| | | RGRRFNRTEKLTVLCIKRDGGVSEEFRQERDYELSVMLLQPKNKLKPEP |
| | | KGELNSFEDLHDHWWFLKGDEATALVGLTSDPTVGDFIQLGLYIRNPIK |
| | | AHGETKRRLLICFEPPIKLPLRRAFPSEAFKTWEPTINVFRNGRRDTEAYY |
| | | DIDRARVFEFPETRVSLEHLSKQWEVLRLEPDRENTDPYEAQQNEGAEL |
| | | QVYSLLQEAAQKMAPKVVIDPFGQFPLELFSTFVAQLFNAPLSDTKAKIG |
| | | KPLDSGFVVESHLHLLEEDFAYRDFVRVTFMGTEPTFRVIHYSNGEGYW |
| | | KKTVLKGKNNIRTALIPEGAKAAVDAYKNKRCPLTLEAAILNEEKDRRL |
| | | VLGNKALSLLAQTARGNLTILEALAAEVLRPLSGTEGVVHLHACVTRHS |
| | | TLTESTETDNM |
| Cas14 | 186 | VEKLFSERLKRAMWLKNEAGRAPPAETLTLKHKRVSGGHEKVKEELQR |
| ortholog 80 | | VLRSLSGTNQAAWNLGLSGGREPKSSDALKGEKSRVVLETVVFHSGHN |
| | | RVLYDVIEREDQVHQRSSIMHMRRKGSNLLRLWGRSGKVRRKMREEVA |
| | | EIKPVWHKDSRWLAIVEEGRQSVVGISSAGLAVFAVQESQCTTAEPKPLE |
| | | YVVSIWFRGSKALNPQDRYLEFKKLKTTEALRGQQYDPIPFSLKRGAGC |
| | | SLAIRGEGIKFGSRGPIKQFFGSDRSRPSHADYDGKRRLSLFSKYAGDLA |
| | | DLTEEQWNRTVSAFAEDEVRRATLANIQDFLSISHEKYAERLKKRIESIEE |
| | | PVSASKLEAYLSAIFETFVQQREALASNFLMRLVESVALLISLEEKSPRVE |
| | | FRVARYLAESKEGFNRKAM |
| Cas14 | 187 | VVITQSELYKERLLRVMEIKNDRGRKEPRESQGLVLRFTQVTGGQEKVK |
| ortholog 81 | | QKLWLIFEGFSGTNQASWNFGQPAGGRKPNSGDALKGPKSRVTYETVV |
| | | FHFGLRLLSAVIERHNLKQQRQTMAYMKRRAAARKKWARSGKKCSRM |
| | | RNEVEKIKPKWHKDPRWFDIVKEGEPSIVGISSAGFAIYIVEEPNFPRQDP |
| | | LEIEYAISIWFRRDRSQYLTFKKIQKAEKLKELQYNPIPFRLKQEKTSLVF |
| | | ESGDIKFGSRGSIEHFRDEARGKPPKADMDNNRRLTMFSVFSGNLTNLTE |
| | | EQYARPVSGLLAPDEKRMPTLLKKLQDFFTPIHEKYGERIKQRLANSEAS |
| | | KRPFKKLEEYLPAIYLEFRARREGLASNWVLVLINSVRTLVRIKSEDPYIE |
| | | FKVSQYLLEKEDNKAL |
| Cas14 | 188 | KQDALFEERLKKAIFIKRQADPLQREELSLLPPNRKIVTGGHESAKDTLK |
| ortholog 82 | | QILRAINGTNQASWNPGTPSGKRDSKSADALAGPKSRVKLETVVFHVGH |
| | | RLLKKVVEYQGHQKQQHGLKAFMRTCAAMRKKWKRSGKVVGELREQ |
| | | LANIQPKWHYDSRPLNLCFEGKPSVVGLRSAGIALYTIQKSVVPVKEPKP |
| | | IEYAVSIWFRGPKAMDREDRCLEFKKLKIATELRKLQFEPIVSTLTQGIKG |
| | | FSLYIQGNSVKFGSRGPIKYFSNESVRQRPPKADPDGNKRLALFSKFSGD |
| | | LSDLTEEQWNRPILAFEGIIRRATLGNIQDYLTVGHEQFAISLEQLLSEKES |
| | | VLQMSIEQQRLKKNLGKKAENEWVESFGAEQARKKAQGIREYISGFFQE |
| | | YCSQREQWAENWVQQLNKSVRLFLTIQDSTPFIEFRVARYLPKGEKKKG |
| | | KAM |
| Cas14 | 189 | ANHAERHKRLRKEANRAANRNRPLVADCDTGDPLVGICRLLRRGDKM |
| ortholog 83 | | QPNKTGCRSCEQVEPELRDAILVSGPGRLDNYKYELFQRGRAMAVHRLL |
| | | KRVPKLNRPKKAAGNDEKKAENKKSEIQKEKQKQRRMMPAVSMKQVS |
| | | VADFKHVIENTVRHLFGDRRDREIAECAALRAASKYFLKSRRVRPRKLP |
| | | KLANPDHGKELKGLRLREKRAKLKKEKEKQAELARSNQKGAVLHVAT |
| | | LKKDAPPMPYEKTQGRNDYTTFVISAAIKVGATRGTKPLLTPQPREWQC |
| | | SLYWRDGQRWIRGGLLGLQAGIVLGPKLNRELLEAVLQRPIECRMSGCG |
| | | NPLQVRGAAVDFFMTTNPFYVSGAAYAQKKFKPFGTKRASEDGAAAKA |
| | | REKLMTQLAKVLDKVVTQAAHSPLDGIWETRPEAKLRAMIMALEHEWI |
| | | FLRPGPCHNAAEEVIKCDCTGGHAILWALIDEARGALEHKEFYAVTRAH |
| | | THDCEKQKLGGRLAGFLDLLIAQDVPLDDAPAARKIKTLLEATPPAPCY |
| | | KAATSIATCDCEGKFDKLWAIIDATRAGHGTEDLWARTLAYPQNVNCK |
| | | CKAGKDLTHRLADFLGLLIKRDGPFRERPPHKVTGDRKLVFSGDKKCKG |
| | | HQYVILAKAHNEEVVRAWISRWGLKSRTNKAGYAATELNLLLNWLSIC |
| | | RRRWMDMLTVQRDTPYIRMKTGRLVVDDKKERKAM |
| Cas14 | 190 | AKQREALRVALERGIVRASNRTYTLVTNCTKGGPLPEQCRMIERGKARA |
| ortholog 84 | | MKWEPKLVGCGSCAAATVDLPAIEEYAQPGRLDVAKYKLTTQILAMAT |
| | | RRMMVRAAKLSRRKGQWPAKVQEEKEEPPEPKKMLKAVEMRPVAIVD |
| | | FNRVIQTTIEHLWAERANADEAELKALKAAAAYFGPSLKIRARGPPKAAI |
| | | GRELKKAHRKKAYAERKKARRKRAELARSQARGAAAHAAIRERDIPPM |
| | | AYERTQGRNDVTTIPIAAAIKIAATRGARPLPAPKPMKWQCSLYWNEGQ |
| | | RWIRGGMLTAQAYAHAANIHRPMRCEMWGVGNPLKVRAFEGRVADPD |
| | | GAKGRKAEFRLQTNAFYVSGAAYRNKKFKPFGTDRGGIGSARKKRERL |
| | | MAQLAKILDKVVSQAAHSPLDDIWHTRPAQKLRAMIKQLEHEWMFLRP |
| | | QAPTVEGTKPDVDVAGNMQRQIKALMAPDLPPIEKGSPAKRFTGDKRK |
| | | KGERAVRVAEAHSDEVVTAWISRWGIQTRRNEGSYAAQELELLLNWLQ |
| | | ICRRRWLDMTAAQRVSPYIRMKSGRMITDAADEGVAPIPLVENM |
| Cas14 | 191 | KSISGRSIKHMACLKDMLKSEITEIEEKQKKESLRKWDYYSKFSDEILFRR |
| ortholog 85 | | NLNVSANHDANACYGCNPCAFLKEVYGFRIERRNNERIISYRRGLAGCK |
| | | SCVQSTGYPPIEFVRRKFGADKAMEIVREVLHRRNWGALARNIGREKEA |
| | | DPILGELNELLLVDARPYFGNKSAANETNLAFNVITRAAKKFRDEGMYD |
| | | IHKQLDIHSEEGKVPKGRKSRLIRIERKHKAIHGLDPGETWRYPHCGKGE |
| | | KYGVWLNRSRLIHIKGNEYRCLTAFGTTGRRMSLDVACSVLGHPLVKK |
| | | KRKKGKKTVDGTELWQIKKATETLPEDPIDCTFYLYAAKPTKDPFILKV |
| | | GSLKAPRWKKLHKDFFEYSDTEKTQGQEKGKRVVRRGKVPRILSLRPD |
| | | AKFKVSIWDDPYNGKNKEGTLLRMELSGLDGAKKPLILKRYGEPNTKPK |
| | | NFVFWRPHITPHPLTFTPKHDFGDPNKKTKRRRVFNREYYGHLNDLAK |
| | | MEPNAKFFEDREVSNKKNPKAKNIRIQAKESLPNIVAKNGRWAAFDPND |
| | | SLWKLYLHWRGRRKTIKGGISQEFQEFKERLDLYKKHEDESEWKEKEK |
| | | LWENHEKEWKKTLEIHGSIAEVSQRCVMQSMMGPLDGLVQKKDYVHI |
| | | GQSSLKAADDAWTFSANRYKKATGPKWGKISVSNLLYDANQANAELIS |
| | | QSISKYLSKQKDNQGCEGRKMKFLIKIIEPLRENFVKHTRWLHEMTQKD |
| | | CEVRAQFSRVSM |
| Cas14 | 192 | FPSDVGADALKHVRMLQPRLTDEVRKVALTRAPSDRPALARFAAVAQD |
| ortholog 86 | | GLAFVRHLNVSANHDSNCTFPRDPRDPRRGPCEPNPCAFLREVWGFRIV |
| | | ARGNERALSYRRGLAGCKSCVQSTGFPSVPFHRIGADDCMRKLHEILKA |
| | | RNWRLLARNIGREREADPLLTELSEYLLVDARTYPDGAAPNSGRLAENV |
| | | IKRAAKKFRDEGMRDIHAQLRVHSREGKVPKGRLQRLRRIERKHRAIHA |
| | | LDPGPSWEAEGSARAEVQGVAVYRSQLLRVGHHTQQIEPVGIVARTLFG |
| | | VGRTDLDVAVSVLGAPLTKRKKGSKTLESTEDFRIAKARETRAEDKIEV |
| | | AFVLYPTASLLRDEIPKDAFPAMRIDRFLLKVGSVQADREILLQDDYYRF |
| | | GDAEVKAGKNKGRTVTRPVKVPRLQALRPDAKFRVNVWADPFGAGDS |
| | | PGTLLRLEVSGVTRRSQPLRLLRYGQPSTQPANFLCWRPHRVPDPMTFTP |
| | | RQKFGERRKNRRTRRPRVFERLYQVHIKHLAHLEPNRKWFEEARVSAQ |
| | | KWAKARAIRRKGAEDIPVVAPPAKRRWAALQPNAELWDLYAHDREAR |
| | | KRFRGGRAAEGEEFKPRLNLYLAHEPEAEWESKRDRWERYEKKWTAV |
| | | LEEHSRMCAVADRTLPQFLSDPLGARMDDKDYAFVGKSALAVAEAFVE |
| | | EGTVERAQGNCSITAKKKFASNASRKRLSVANLLDVSDKADRALVFQA |
| | | VRQYVQRQAENGGVEGRRMAFLRKLLAPLRQNFVCHTRWLHM |
| Cas14 | 193 | AARKKKRGKIGITVKAKEKSPPAAGPFMARKLVNVAANVDGVEVHLCV |
| ortholog 87 | | ECEADAHGSASARLLGGCRSCTGSIGAEGRLMGSVDVDRERVIAEPVHT |
| | | ETERLGPDVKAFEAGTAESKYAIQRGLEYWGVDLISRNRARTVRKMEE |
| | | ADRPESSTMEKTSWDEIAIKTYSQAYHASENHLFWERQRRVRQHALALF |
| | | RRARERNRGESPLQSTQRPAPLVLAALHAEAAAISGRARAEYVLRGPSA |
| | | NVRAAAADIDAKPLGHYKTPSPKVARGFPVKRDLLRARHRIVGLSRAYF |
| | | KPSDVVRGTSDAIAHVAGRNIGVAGGKPKEIEKTFTLPFVAYWEDVDRV |
| | | VHCSSFKADGPWVRDQRIKIRGVSSAVGTFSLYGLDVAWSKPTSFYIRCS |
| | | DIRKKFHPKGFGPMKHWRQWAKELDRLTEQRASCVVRALQDDEELLQT |
| | | MERGQRYYDVFSCAATHATRGEADPSGGCSRCELVSCGVAHKVTKKA |
| | | KGDTGIEAVAVAGCSLCESKLVGPSKPRVHRQMAALRQSHALNYLRRL |
| | | QREWEALEAVQAPTPYLRFKYARHLEVRSM |
| Cas14 | 194 | AAKKKKQRGKIGISVKPKEGSAPPADGPFMARKLVNVAANVDGVEVNL |
| ortholog 88 | | CIECEADAHGSAPARLLGGCKSCTGSIGAEGRLMGSVDVDRADAIAKPV |
| | | NTETEKLGPDVQAFEAGTAETKYALQRGLEYWGVDLISRNRSRTVRRTE |
| | | EGQPESATMEKTSWDEIAIKSYTRAYHASENHLFWERQRRVRQHALALF |
| | | KRAKERNRGDSTLPREPGHGLVAIAALACEAYAVGGRNLAETVVRGPT |
| | | FGTARAVRDVEIASLGRYKTPSPKVAHGSPVKRDFLRARHRIVGLARAY |
| | | YRPSDVVRGTSDAIAHVAGRNIGVAGGKPRAVEAVFTLPFVAYWEDVD |
| | | RVVHCSSFQVSAPWNRDQRMKIAGVTTAAGTFSLHGGELKWAKPTSFY |
| | | IRCSDTRRKFRPKGFGPMKRWRQWAKDLDRLVEQRASCVVRALQDDA |
| | | ALLETMERGQRYYDVFACAVTHATRGEADRLAGCSRCALTPCQEAHRV |
| | | TTKPRGDAGVEQVQTSDCSLCEGKLVGPSKPRLHRTLTLLRQEHGLNYL |
| | | RRLQREWESLEAVQVPTPYLRFKYARHLEVRSM |
| Cas14 | 195 | TDSQSESVPEVVYALTGGEVPGRVPPDGGSAEGARNAPTGLRKQRGKIK |
| ortholog 89 | | ISAKPSKPGSPASSLARTLVNEAANVDGVQSSGCATCRMRANGSAPRAL |
| | | PIGCVACASSIGRAPQEETVCALPTTQGPDVRLLEGGHALRKYDIQRALE |
| | | YWGVDLIGRNLDRQAGRGMEPAEGATATMKRVSMDELAVLDFGKSYY |
| | | ASEQHLFAARQRRVRQHAKALKIRAKHANRSGSVKRALDRSRKQVTAL |
| | | AREFFKPSDVVRGDSDALAHVVGRNLGVSRHPAREIPQTFTLPLCAYWE |
| | | DVDRVISCSSLLAGEPFARDQEIRIEGVSSALGSLRLYRGAIEWHKPTSLY |
| | | IRCSDTRRKFRPRGGLKKRWRQWAKDLDRLVEQRACCIVRSLQADVEL |
| | | LQTMERAQRFYDVHDCAATHVGPVAVRCSPCAGKQFDWDRYRLLAAL |
| | | RQEHALNYLRRLQREWESLEAQQVKMPYLRFKYARKLEVSGPLIGLEV |
| | | RREPSMGTAIAEM |
| Cas14 | 196 | AGTAGRRHGSLGARRSINIAGVTDRHGRWGCESCVYTRDQAGNRARCA |
| ortholog 90 | | PCDQSTYAPDVQEVTIGQRQAKYTIFLTLQSFSWTNTMRNNKRAAAGRS |
| | | KRTTGKRIGQLAEIKITGVGLAHAHNVIQRSLQHNITKMWRAEKGKSKR |
| | | VARLKKAKQLTKRRAYFRRRMSRQSRGNGFFRTGKGGIHAVAPVKIGL |
| | | DVGMIASGSSEPADEQTVTLDAIWKGRKKKIRLIGAKGELAVAACRFRE |
| | | QQTKGDKCIPLILQDGEVRWNQNNWQCHPKKLVPLCGLEVSRKFVSQA |
| | | DRLAQNKVASPLAARFDKTSVKGTLVESDFAAVLVNVTSIYQQCHAML |
| | | LRSQEPTPSLRVQRTITSM |
| Cas14 | 197 | GVRFSPAQSQVFFRTVIPQSVEARFAINMAAIHDAAGAFGCSVCRFEDRT |
| ortholog 91 | | PRNAKAVHGCSPCTRSTNRPDVFVLPVGAIKAKYDVFMRLLGFNWTHL |
| | | NRRQAKRVTVRDRIGQLDELAISMLTGKAKAVLKKSICHNVDKSFKAM |
| | | RGSLKKLHRKASKTGKSQLRAKLSDLRERTNTTQEGSHVEGDSDVALN |
| | | KIGLDVGLVGKPDYPSEESVEVVVCLYFVGKVLILDAQGRIRDMRAKQY |
| | | DGFKIPIIQRGQLTVLSVKDLGKWSLVRQDYVLAGDLRFEPKISKDRKYA |
| | | ECVKRIALITLQASLGFKERIPYYVTKQVEIKNASHIAFVTEAIQNCAENF |
| | | REMTEYLMKYQEKSPDLKVLLTQLM |
| Cas14 | 198 | RAVVGKVFLEQARRALNLATNFGTNHRTGCNGCYVTPGKLSIPQDGEK |
| ortholog 92 | | NAAGCTSCLMKATASYVSYPKPLGEKVAKYSTLDALKGFPWYSLRLNL |
| | | RPNYRGKPINGVQEVAPVSKFRLAEEVIQAVQRYHFTELEQSFPGGRRRL |
| | | RELRAFYTKEYRRAPEQRQHVVNGDRNIVVVTVLHELGFSVGMFNEVE |
| | | LLPKTPIECAVNVFIRGNRVLLEVRKPQFDKERLLVESLWKKDSRRHTA |
| | | KWTPPNNEGRIFTAEGWKDFQLPLLLGSTSRSLRAIEKEGFVQLAPGRDP |
| | | DYNNTIDEQHSGRPFLPLYLYLQGTISQEYCVFAGTWVIPFQDGISPYSTK |
| | | DTFQPDLKRKAYSLLLDAVKHRLGNKVASGLQYGRFPAIEELKRLVRM |
| | | HGATRKIPRGEKDLLKKGDPDTPEWWLLEQYPEFWRLCDAAAKRVSQN |
| | | VGLLLSLKKQPLWQRRWLESRTRNEPLDNLPLSMALTLHLTNEEAL |
| Cas14 | 199 | AAVYSKFYIENHFKMGIPETLSRIRGPSIIQGFSVNENYINIAGVGDRDFIF |
| ortholog 93 | | GCKKCKYTRGKPSSKKINKCHPCKRSTYPEPVIDVRGSISEFKYKIYNKL |
| | | KQEPNQSIKQNTKGRMNPSDHTSSNDGIIINGIDNRIAYNVIFSSYKHLME |
| | | KQINLLRDTTKRKARQIKKYNNSGKKKHSLRSQTKGNLKNRYHMLGMF |
| | | KKGSLTITNEGDFITAVRKVGLDISLYKNESLNKQEVETELCLNIKWGRT |
| | | KSYTVSGYIPLPINIDWKLYLFEKETGLTLRLFGNKYKIQSKKFLIAQLFK |
| | | PKRPPCADPVVKKAQKWSALNAHVQQMAGLFSDSHLLKRELKNRMHK |
| | | QLDFKSLWVGTEDYIKWFEELSRSYVEGAEKSLEFFRQDYFCFNYTKQT |
| | | TM |
| Cas14 | 200 | PQQQRDLMLMAANYDQDYGNGCGPCTVVASAAYRPDPQAQHGCKRH |
| ortholog 94 | | LRTLGASAVTHVGLGDRTATITALHRLRGPAALAARARAAQAASAPMT |
| | | PDTDAPDDRRRLEAIDADDVVLVGAHRALWSAVRRWADDRRAALRRR |
| | | LHSEREWLLKDQIRWAELYTLIEASGTPPQGRWRNTLGALRGQSRWRR |
| | | VLAPTMRATCAETHAELWDALAELVPEMAKDRRGLLRPPVEADALWR |
| | | APMIVEGWRGGHSVVVDAVAPPLDLPQPCAWTAVRLSGDPRQRWGLH |
| | | LAVPPLGQVQPPDPLKATLAVSMRHRGGVRVRTLQAMAVDADAPMQR |
| | | HLQVPLTLQRGGGLQWGIHSRGVRRREARSMASWEGPPIWTGLQLVNR |
| | | WKGQGSALLAPDRPPDTPPYAPDAAVAPAQPDTKRARRTLKEACTVCR |
| | | CAPGHMRQLQVTLTGDGTWRRFRLRAPQGAKRKAEVLKVATQHDERI |
| | | ANYTAWYLKRPEHAAGCDTCDGDSRLDGACRGCRPLLVGDQCFRRYL |
| | | DKIEADRDDGLAQIKPKAQEAVAAMAAKRDARAQKVAARAAKLSEAT |
| | | GQRTAATRDASHEARAQKELEAVATEGTTVRHDAAAVSAFGSWVARK |
| | | GDEYRHQVGVLANRLEHGLRLQELMAPDSVVADQQRASGHARVGYRY |
| | | VLTAM |
| Cas14 | 201 | AVAHPVGRGNAGSPGARGPEELPRQLVNRASNVTRPATYGCAPCRHVR |
| ortholog 95 | | LSIPKPVLTGCRACEQTTHPAPKRAVRGGADAAKYDLAAFFAGWAADL |
| | | EGRNRRRQVHAPLDPQPDPNHEPAVTLQKIDLAEVSIEEFQRVLARSVK |
| | | HRHDGRASREREKARAYAQVAKKRRNSHAHGARTRRAVRRQTRAVRR |
| | | AHRMGANSGEILVASGAEDPVPEAIDHAAQLRRRIRACARDLEGLRHLS |
| | | RRYLKTLEKPCRRPRAPDLGRARCHALVESLQAAERELEELRRCDSPDT |
| | | AMRRLDAVLAAAASTDATFATGWTVVGMDLGVAPRGSAAPEVSPMEM |
| | | AISVFWRKGSRRVIVSKPIAGMPIRRHELIRLEGLGTLRLDGNHYTGAGV |
| | | TKGRGLSEGTEPDFREKSPSTLGFTLSDYRHESRWRPYGAKQGKTARQF |
| | | FAAMSRELRALVEHQVLAPMGPPLLEAHERRFETLLKGQDNKSIHAGGG |
| | | GRYVWRGPPDSKKRPAADGDWFRFGRGHADHRGWANKRHELAANYL |
| | | QSAFRLWSTLAEAQEPTPYARYKYTRVTM |
| Cas14 | 202 | WDFLTLQVYERHTSPEVCVAGNSTKCASGTRKSDHTHGVGVKLGAQEI |
| ortholog 96 | | NVSANDDRDHEVGCNICVISRVSLDIKGWRYGCESCVQSTPEWRSIVRF |
| | | DRNHKEAKGECLSRFEYWGAQSIARSLKRNKLMGGVNLDELAIVQNEN |
| | | VVKTSLKHLFDKRKDRIQANLKAVKVRMRERRKSGRQRKALRRQCRKL |
| | | KRYLRSYDPSDIKEGNSCSAFTKLGLDIGISPNKPPKIEPKVEVVFSLFYQ |
| | | GACDKIVTVSSPESPLPRSWKIKIDGIRALYVKSTKVKFGGRTFRAGQRN |
| | | NRRKVRPPNVKKGKRKGSRSQFFNKFAVGLDAVSQQLPIASVQGLWGR |
| | | AETKKAQTICLKQLESNKPLKESQRCLFLADNWVVRVCGFLRALSQRQG |
| | | PTPYIRYRYRCNM |
| Cas14 | 203 | ARNVGQRNASRQSKRESAKARSRRVTGGHASVTQGVALINAAANADR |
| ortholog 97 | | DHTTGCEPCTWERVNLPLQEVIHGCDSCTKSSPFWRDIKVVNKGYREAK |
| | | EEIMRIASGISADHLSRALSHNKVMGRLNLDEVCILDFRTVLDTSLKHLT |
| | | DSRSNGIKEHIRAVHRKIRMRRKSGKTARALRKQYFALRRQWKAGHKP |
| | | NSIREGNSLTALRAVGFDVGVSEGTEPMPAPQTEVVLSVFYKGSATRILR |
| | | ISSPHPIAKRSWKVKIAGIKALKLIRREHDFSFGRETYNASQRAEKRKFSP |
| | | HAARKDFFNSFAVQLDRLAQQLCVSSVENLWVTEPQQKLLTLAKDTAP |
| | | YGIREGARFADTRARLAWNWVFRVCGFTRALHQEQEPTPYCRFTWRSK |
| | | M |
| CasM | 2435 | MSVLTRKVQLIPVGDKEERDRVYKYLRDGIEAQNRAMNLYMSGLYFAA |
| 265466 | | INEASKEDRKELNQLYSRIATSSKGSAYTTDIEFPTGLASTSTLSMAVRQD |
| | | FTKSLKDGLMYGRVSLPTYRKDNPLFVDVRFVALRGTKQKYNGLYHEY |
| | | KSHTEFLDNLYSSDLKVYIKFANDITFQVIFGNPRKSSALRSEFQNIFEEY |
| | | YKVCQSSIQFSGTKIILNMAMDIPDKEIELDEDVCVGVDLGIAIPAVCALN |
| | | KNRYSRVSIGSKEDFLRVRTKIRNQRKRLQTNLKSSNGGHGRKKKMKP |
| | | MDRFRDYEANWVQNYNHYVSRQVVDFAVKNKAKYINLENLEGIRDDV |
| | | KNEWLLSNWSYYQLQQYITYKAKTYGIEVRKINPYHTSQRCSCCGYED |
| | | AGNRPKKEKGQAYFKCLKCGEEMNADFNAARNIAMSTEFQSGKKTKK |
| | | QKKEQHENK |
| CasΦ.12 | 2592 | MIKPTVSQFLTPGFKLIRNHSRTAGRKLKNEGEEACKKFVRENEIPKDEC |
| L26R | | PNFQGGPAIANIIAKSREFTEWEIYQSSLAIQEVIFTLPKDKLPEPILKEEW |
| | | RAQWLSEHGLDTVPYKEAAGLNLIIKNAVNTYKGVQVKVDNKNKNNL |
| | | AKINRKNEIAKLNGEQEISFEEIKAFDDKGYLLQKPSPNKSIYCYQSVSPK |
| | | PFITSKYHNVNLPEEYIGYYRKSNEPIVSPYQFDRLRIPIGEPGYVPKWQY |
| | | TFLSKKENKRRKLSKRIKNVSPILGIICIKKDWCVFDMRGLLRTNHWKKY |
| | | HKPTDSINDLFDYFTGDPVIDTKANVVRFRYKMENGIVNYKPVREKKGK |
| | | ELLENICDQNGSCKLATVDVGQNNPVAIGLFELKKVNGELTKTLISRHPT |
| | | PIDFCNKITAYRERYDKLESSIKLDAIKQLTSEQKIEVDNYNNNFTPQNTK |
| | | QIVCSKLNINPNDLPWDKMISGTHFISEKAQVSNKSEIYFTSTDKGKTKD |
| | | VMKSDYKWFQDYKPKLSKEVRDALSDIEWRLRRESLEFNKLSKSREQD |
| | | ARQLANWISSMCDVIGIENLVKKNNFFGGSGKREPGWDNFYKPKKENR |
| | | WWINAIHKALTELSQNKGKRVILLPAMRTSITCPKCKYCDSKNRNGEKF |
| | | NCLKCGIELNADIDVATENLATVAITAQSMPKPTCERSGDAKKPVRARK |
| | | AKAPEFHDKLAPSYTVVLREAV |
| CasM. | 2599 | MVITRKIALTVVGNKEEKDRVYTYIRDGIKNQNLAMNQYMSALYVAN |
| 292007 | | MQDISKDDRKELNHLYTRISTSKKGSAYSTDIQFPKGLPCTSSLGQEVRA |
| | | KFKKACKDGLMYGRVSLPTYRANNPLLIHVDYVRLRSTNPHNDTGLYH |
| | | NYESHTEFLEHLYKNDCEVFIKFANNITFQLFFGQPHKSHELRSVIQKVFE |
| | | EYYSVCGSSIEISKKGKIMLNMCIEIPVEKKELDENIVVGVDLGISTPAMC |
| | | GLNCNDYVREGIGSKDTLLSKRTQLQRQYRELQGRMKMTNGGHGRGK |
| | | KLKKMDDYRNHERHFVQTYNHQVSKKIVDFALKYKAKYINVEDLSGFG |
| | | NRDTNQWVLRNWSYYELQQYITYKAQKYGIEVRKVKPYLTSQTCSHCG |
| | | HYEPGQRLDQAHFECKNCGLKINADFNASRNIAMSTEFV |
| CasM. | 2601 | MSVLTRKVQLIPVGDKEERDRVYKYLRDGIEAQNRAMNLYMSGLYFAA |
| 265466 | | INEASKEDRKELNQLYSRIATSSKGSAYTTDIEFPTGLASTSTLSMAVRQD |
| D220R | | FTKSLKDGLMYGRVSLPTYRKDNPLFVDVRFVALRGTKQKYNGLYHEY |
| | | KSHTEFLDNLYSSDLKVYIKFANDITFQVIFGNPRKSSALRSEFQNIFEEY |
| | | YKVCQSSIQFSGTKIILNMAMDIPDKEIELDEDVCVGVDLGIAIPAVCALN |
| | | KNRYSRVSIGSKEDFLRVRTKIRNQRKRLQTNLKSSNGGHGRKKKMKP |
| | | MDRFRDYEANWVQNYNHYVSRQVVDFAVKNKAKYINLENLEGIRDDV |
| | | KNEWLLSNWSYYQLQQYITYKAKTYGIEVRKINPYHTSQRCSCCGYED |
| | | AGNRPKKEKGQAYFKCLKCGEEMNADFNAARNIAMSTEFQSGKKTKK |
| | | QKKEQHENK |

[0360] TABLE 1.1 provides illustrative nuclear localization sequences that are useful in the compositions, systems and methods described herein

TABLE 1.1
Exemplary Nuclear Localization Signal Sequences

| SEQ | | |
|---|---|---|
| ID | | |
| NO: | Description | Sequence |
| 1584 | NLS | KRPAATKKAGQAKKKKEF |
| 1585 | NLS | PKKKRKV |
| 1586 | NLS | PAAKRVKLD |
| 1587 | NLS | PKKKRKVGIHGVPAA |
| 2642 | NLS | KR(K/R)R |
| 2643 | NLS | (P/R)XXKR(\hat{ }D/E)(K/R) |
| 2644 | NLS | KRX(W/F/Y)XXAF |
| 2645 | NLS | (R/P)XXKR(K/R)(\hat{ }D/E) |
| 2646 | NLS | LGKR(K/R)(W/F/Y) |
| 2647 | NLS | KRX₁₀K(K/R)(K/R) |
| 2648 | NLS | K(K/R)RK |
| 2649 | NLS | KRX₁₁K(K/R)(K/R) |
| 2650 | NLS | KRX₁₂K(K/R)(K/R) |
| 2651 | NLS | KRX₁₀K(K/R)X(K/R) |
| 2652 | NLS | KRX₁₁K(K/R)X(K/R) |
| 2653 | NLS | KRX₁₂K(K/R)X(K/R) |
| 2654 | NLS | APKKKRKVGIHGVPAA |
| 2655 | NLS | LPPLERLTL |

*wherein X is any naturally occurring amino acid; and \hat{ }D/E is any naturally occurring amino acid except Asp or Glu

[0361] TABLE 2 provides illustrative nucleotide sequences (DNA sequences) of repeat sequences that are useful in the compositions, systems and methods described herein.

TABLE 2
Exemplary Repeat Sequences (DNA sequences) for CasΦ Effector Proteins

| | | SEQ ID. |
|---|---|---|
| Name | Repeat sequence (shown as DNA), 5′-to-3′ | NO. |
| CasΦ.01 | GGAGAGATCTCAAACGATTGCTCGATTAGTCGAGAC | 204 |
| CasΦ.02 | GTCGGAACGCTCAACGATTGCCCCTCACGAGGGGAC | 205 |
| CasΦ.04 | ACCAAAACGACTATTGATTGCCCAGTACGCTGGGAC | 206 |
| CasΦ.07 | GGATCCAATCCTTTTTGATTGCCCAATTCGTTGGGAC | 207 |
| CasΦ.10 | GGATCTGAGGATCATTATTGCTCGTTACGACGAGAC | 208 |
| CasΦ.11 | CCTGCGAAACCTTTTGATTGCTCAGTACGCTGAGAC | 209 |
| CasΦ.12 | CTTTCAAGACTAATAGATTGCTCCTTACGAGGAGAC | 210 |
| CasΦ.13 | GTAGAAGACCTCGCTGATTGCTCGGTGCGCCGAGAC | 211 |
| CasΦ.17 | ATGGCAACAGACTCTCATTGCGCGGTACGCCGCGAC | 212 |
| CasΦ.18 | ACCAAAACGACTATTGATTGCCCAGTACGCTGGGAC | 206 |
| CasΦ.19 | GTCGCTCTCTAACGCTTGCCCAGTACGCTGGGAC | 213 |
| CasΦ.20 | GCTGGAAGACTCAATGATGGCTCCTTACGAGGAGAC | 214 |
| CasΦ.21 | GGTTGAACCCTCAACAGATTGCTCGGTAAGCCGAGAC | 215 |
| CasΦ.22 | GGTTGAACCCTCAACAGATTGCTCGGTAAGCCGAGAC | 215 |
| CasΦ.23 | CTTGAAATCCTGTCAGATTGCTCCCTTCGGGGAGAC | 216 |
| CasΦ.24 | GCTGGAAGACTCAATGATGGCTCCTTACGAGGAGAC | 214 |
| CasΦ.25 | GCTGGAAGACTCAATGATGGCTCCTTACGAGGAGAC | 214 |
| CasΦ.26 | CTAGGAACGCACGCAGATTGCTCGGTACGCCGAGAC | 217 |
| CasΦ.27 | ATTGCAACGCCTAAAGATTGCTCGATACGTCGAGAC | 218 |
| CasΦ.28 | GTTCGGCRAYCCTTTGATTGCTCAGTACGCTGAGAC | 219 |
| CasΦ.29 | GTTGAACCTAGATCAGATGGCTCAGTACGCTGAGAC | 220 |
| CasΦ.30 | CCCTCAACACGTCAGAAATGCCCGGCACGCCGGGAC | 221 |
| CasΦ.31 | GTCGCAAGACTCGAATAATTGCCCCTCTATGGGGAC | 222 |
| CasΦ.32 | GCTGGGGACCGATCCTGATTGCTCGCTGCGGCGAGAC | 223 |
| CasΦ.33 | CTCTCAATGGATAACGATTGCTCTCTACGGAGAGAC | 224 |
| CasΦ.34 | GCTGGAAGACTCAATGATGGCTCCTTACGAGGAGAC | 214 |
| CasΦ.35 | GTTGAACCCTCAACAGATTGCTCGGTAAGCCGAGAC | 225 |
| CasΦ.36 | GTCGCAAGACTCGAATAATTGCCCCTCTATGGGGAC | 222 |
| CasΦ.37 | GTCGGAACGCTCAACGATTGCCCCTCACGAGGGGAC | 205 |
| CasΦ.38 | GTTGAACCTAGATCAGATGGCTCAGTACGCTGAGAC | 220 |
| CasΦ.39 | CTCTCAATGGATAACGATTGCTCTCTACGGAGAGAC | 224 |
| CasΦ.41 | ACTGAAACCACCAACGATTGCGCTCCTCGGAGCGAC | 226 |
| CasΦ.42 | ACCAAAACGACTATTGATTGCCCAGTACGCTGGGAC | 206 |
| CasΦ.43 | GTTGAACCTAGATCAGATGGCTCAGTACGCTGAGAC | 220 |
| CasΦ.44 | GTTGAACCCTCAACAGATTGCTCGGTAAGCCGAGAC | 225 |
| CasΦ.45 | GTTGAACCTAGATCAGATGGCTCAGTACGCTGAGAC | 220 |
| CasΦ.46 | GTCGGAACGCTCAACGATTGCCCCTCACGAGGGGAC | 205 |
| CasΦ.47 | GGTTGAACCCTCAACAGATTGCTCGGTAAGCCGAGAC | 215 |
| CasΦ.48 | GGTTGAACCCTCAACAGATTGCTCGGTAAGCCGAGAC | 215 |

[0362] TABLE 3 provides illustrative nucleotide sequences (RNA sequences) of repeat sequences that are useful in the compositions, systems and methods described herein.

TABLE 3
Exemplary crRNA Repeat Sequence for CasM Effector Proteins

| | | SEQ |
|---|---|---|
| | | ID |
| Name | Repeat sequence | NO. |
| CasM.298706 | CGUUGCAGCUCGCACGUUGGCACUGGUUGAAGG | 1588 |
| CasM.280604 | GUUGCAACUCACGCGCGUAUGUGGCUUGAAGG | 1589 |
| CasM.281060 | GUUGCAAUUCAUAUCUCCGGGUGGAUUGAAGG | 1590 |
| CasM.284933 | GUUGCAGCGUGCGCGAGCGUGUGGCUUGAAGG | 1591 |
| CasM.287908 | GUUGCAACUCGCACGUGAAUGCGACUUGAAGG | 1592 |
| CasM.288518 | GAUGCAACUCGUGUGUAUGUGCGAGUUGAAGG | 1593 |
| CasM.293891 | GACGCAACUCGCGCGCGGGCAUGUAUUGAGGG | 1594 |
| CasM.294270 | GAUGCAUCUGACACAGCUGGGUGAGUUGAAGG | 1595 |
| CasM.294491 | GUUGCAACACAUGUAUGUGGGUGAGUUGAAGG | 1596 |
| CasM.295047 | GUUGCAGCGUGCGCGAGCGUGUGGCUUGAAGG | 1591 |
| CasM.299588 | GUUGCAAUUUGUAUACGAGUGUGACUUGAAGG | 1597 |
| CasM.277328 | GCUGCAACACGCGCGGGUACGCGGGUUGAAGG | 1598 |
| CasM.297894 | GUUGCAACUCGCACGUUGGCACUGAUUGAAGG | 1599 |
| CasM.291449 | GCUGUAGCCCUGCUCAAAUUGUAGGGCGCAUGCAGG | 1600 |
| CasM.291449 | GCUGUAGCCCUGCUCAAAUUGUAGGGCGCAUGCAGG | 1600 |
| CasM.297599 | GUUGUAGUCGACCUGAAUCUGUGGGGUGCUUACAGG | 1601 |
| CasM.297599 | GUUGUAGUCGACCUGAAUCUGUGGGGUGCUUACAGG | 1601 |
| CasM.286588 | GGUGUAUGUAACCGCAAUUUGAAGGGUGCAUACAGG | 1602 |
| CasM.286588 | GGUGUAUGUAACCGCAAUUUGAAGGGUGCAUACAGG | 1602 |
| CasM.286910 | GUUGGAAUCGACCUUAAUUUGAGGUGUGCUUACAGG | 1603 |
| CasM.286910 | GUUGGAAUCGACCUUAAUUUGAGGUGUGCUUACAGG | 1603 |
| CasM.292335 | GCUGAAAGAGCAGAGAAUUUGUUGUGUGCAUACAGG | 1604 |
| CasM.292335 | GCUGAAAGAGCAGAGAAUUUGUUGUGUGCAUACAGG | 1604 |
| CasM.293576 | GUUGGAGUCGGCUUGAAUCUGCGGGGUGCUUACAGG | 1605 |
| CasM.293576 | GUUGGAGUCGGCUUGAAUCUGCGGGGUGCUUACAGG | 1605 |
| CasM.294537 | GUUGGAAUCGACCUUAAUUUGAGGUGUGCUUACAGG | 1603 |
| CasM.294537 | GUUGGAAUCGACCUUAAUUUGAGGUGUGCUUACAGG | 1603 |
| CasM.298538 | GUUGUAAGAGACCCGAAUUUUAGCUGUGUAUACAGG | 1606 |
| CasM.298538 | GUUGUAAGAGACCCGAAUUUUAGCUGUGUAUACAGG | 1606 |
| CasM.19924 | GUUGUGAAUGCAGGCAUUUUUGAUGGUAAAUCCAAC | 1607 |
| CasM.19952 | ACUGUCAGACAAUGCAAAAUGUGUGGUACAUCCAAC | 1608 |
| CasM.274559 | GCUGUCAGUAGUAGUAAAAAUGGGGGUACAUCCAAC | 1609 |
| CasM.286251 | ACUGUCAGUACAUGCAAAAAUGAGGGUACAUCCAAC | 1610 |
| CasM.288480 | ACUGUCAGACAAUGCAAAAUGAGUGGUACAUCCAAC | 1611 |
| CasM.288668 | GCUGUUAGAACAUACAAAAUGAAAGGUACAUCCAAC | 1612 |
| CasM.289206 | GCUGCAUGUCAUGGCAAAAGGAAAGGUACAUCCAAC | 1613 |
| CasM.290598 | GCUGUCAGACACCUAAAAAAUGAGGGUACAUCCAAC | 1614 |
| CasM.290816 | GCUGUGAGUCACAGUAAAAAUGAAGGUAUAUCCAAC | 1615 |
| CasM.295071 | ACUGUCAGUACAUGCAAAAAUGAGGGUACAUCCAAC | 1610 |
| CasM.295231 | GCUGUGAGUCACAGUAAAAAUGAAGGUAUAUCCAAC | 1615 |
| CasM.292139 | GAUGUAUAUGCUAUGAUUUUGUAUGGUACAUCCAAC | 1616 |
| CasM.292139 | GAUGUAUAUGCUAUGAUUUUGUAUGGUACAUCCAAC | 1616 |
| CasM.279423 | GCUGUCAGUAGUAGUAAAAAUGGGGGUACAUCCAAC | 1609 |
| CasM.20054 | GUUGAGCUCUGCAUUACGCAGAUGAAUGACGAG | 1617 |
| CasM.20054 | GUUGAGCUCUGCAUUACGCAGAUGAAUGACGAG | 1617 |
| CasM.282673 | GAUGCAACUUAGAUGCAUAUGUAAGUUGUGAG | 1618 |
| CasM.282673 | GAUGCAACUUAGAUGCAUAUGUAAGUUGUGAG | 1618 |
| CasM.282952 | GUUGCAAUCUGCGUACAGGCGUAAGAUGUGAG | 1619 |
| CasM.282952 | GUUGCAAUCUGCGUACAGGCGUAAGAUGUGAG | 1619 |
| CasM.283262 | GAUCAUAUCUGCUUGUAUGGGUAUGCUGCGAG | 1620 |
| CasM.283262 | GAUCAUAUCUGCUUGUAUGGGUAUGCUGCGAG | 1620 |
| CasM.284833 | GUUGCAACUUACGCAUAGGUGUAAAAUACGAG | 1621 |
| CasM.284833 | GUUGCAACUUACGCAUAGGUGUAAAAUACGAG | 1621 |
| CasM.287700 | GAUUAUAUCUGCUUGUAUGGGUAUACUGCGAG | 1622 |
| CasM.291507 | GUUGCAACUUACGCAUAGGUGUAAAAUACGAG | 1621 |
| CasM.291507 | GUUGCAACUUACGCAUAGGUGUAAAAUACGAG | 1621 |
| CasM.293410 | UCAGCUCACAACCUACAUAUGCAUACAAGAUAUAUCGU | 1623 |
| CasM.293410 | UCAGCUCACAACCUACAUAUGCAUACAAGAUAUAUCGU | 1623 |
| CasM.295105 | GAUCAUAUCUGCUUGUAUGGGUAUGCUGCGAG | 1620 |
| CasM.295105 | GAUCAUAUCUGCUUGUAUGGGUAUGCUGCGAG | 1620 |
| CasM.295187 | GAUAUAUCUUGUAUGCAUAUGUAGGUUGUGAG | 1624 |
| CasM.295187 | GAUAUAUCUUGUAUGCAUAUGUAGGUUGUGAG | 1624 |
| CasM.295929 | GUUGCAAUGAACGUAUGUGCAUGAGGUGUGAG | 1625 |
| CasM.295929 | GUUGCAAUGAACGUAUGUGCAUGAGGUGUGAG | 1625 |
| CasΦ.01 | GGAGAGAUCUCAAACGAUUGCUCGAUUAGUCGAGAC | 2073 |
| CasΦ.02 | GUCGGAACGCUCAACGAUUGCCCCUCACGAGGGGAC | 2074 |
| CasΦ.04 | ACCAAAACGACUAUUGAUUGCCCAGUACGCUGGGAC | 2075 |
| CasΦ.07 | GGAUCCAAUCCUUUUUGAUUGCCCAAUUCGUUGGGAC | 2076 |
| CasΦ.10 | GGAUCUGAGGAUCAUUAUUGCUCGUUACGACGAGAC | 2077 |
| CasΦ.11 | CCUGCGAAACCUUUUGAUUGCUCAGUACGCUGAGAC | 2078 |
| CasΦ.12 | CUUUCAAGACUAAUAGAUUGCUCCUUACGAGGAGAC | 2079 |
| CasΦ.13 | GUAGAAGACCUCGCUGAUUGCUCGGUGCGCCGAGAC | 2080 |
| CasΦ.17 | AUGGCAACAGACUCUCAUUGCGCGGUACGCCGCGAC | 2081 |
| CasΦ.18 | ACCAAAACGACUAUUGAUUGCCCAGUACGCUGGGAC | 2075 |
| CasΦ.19 | GUCGCUCUCUAACGCUUGCCCAGUACGCUGGGAC | 2082 |
| CasΦ.20 | GCUGGAAGACUCAAUGAUGGCUCCUUACGAGGAGAC | 2083 |
| CasΦ.21 | GGUUGAACCCUCAACAGAUUGCUCGGUAAGCCGAGAC | 2084 |
| CasΦ.22 | GGUUGAACCCUCAACAGAUUGCUCGGUAAGCCGAGAC | 2084 |
| CasΦ.23 | CUUGAAAUCCUGUCAGAUUGCUCCCUUCGGGGAGAC | 2085 |
| CasΦ.24 | GCUGGAAGACUCAAUGAUGGCUCCUUACGAGGAGAC | 2083 |
| CasΦ.25 | GCUGGAAGACUCAAUGAUGGCUCCUUACGAGGAGAC | 2083 |
| CasΦ.26 | CUAGGAACGCACGCAGAUUGCUCGGUACGCCGAGAC | 2086 |
| CasΦ.27 | AUUGCAACGCCUAAAGAUUGCUCGAUACGUCGAGAC | 2087 |
| CasΦ.28 | GUUCGGCRAYCCUUUGAUUGCUCAGUACGCUGAGAC | 2088 |
| CasΦ.29 | GUUGAACCUAGAUCAGAUGGCUCAGUACGCUGAGAC | 2089 |
| CasΦ.30 | CCCUCAACACGUCAGAAAUGCCCGGCACGCCGGGAC | 2090 |
| CasΦ.31 | GUCGCAAGACUCGAAUAAUUGCCCCUCUAUGGGGAC | 2091 |
| CasΦ.32 | GCUGGGGACCGAUCCUGAUUGCUCGCUGCGGCGAGAC | 2092 |
| CasΦ.33 | CUCUCAAUGGAUAACGAUUGCUCUCUACGGAGAGAC | 2093 |
| CasΦ.34 | GCUGGAAGACUCAAUGAUGGCUCCUUACGAGGAGAC | 2083 |
| CasΦ.35 | GUUGAACCCUCAACAGAUUGCUCGGUAAGCCGAGAC | 2094 |
| CasΦ.36 | GUCGCAAGACUCGAAUAAUUGCCCCUCUAUGGGGAC | 2091 |
| CasΦ.37 | GUCGGAACGCUCAACGAUUGCCCCUCACGAGGGGAC | 2074 |
| CasΦ.38 | GUUGAACCUAGAUCAGAUGGCUCAGUACGCUGAGAC | 2089 |
| CasΦ.39 | CUCUCAAUGGAUAACGAUUGCUCUCUACGGAGAGAC | 2093 |
| CasΦ.41 | ACUGAAACCACCAACGAUUGCGCUCCUCGGAGCGAC | 2095 |
| CasΦ.42 | ACCAAAACGACUAUUGAUUGCCCAGUACGCUGGGAC | 2075 |
| CasΦ.43 | GUUGAACCUAGAUCAGAUGGCUCAGUACGCUGAGAC | 2089 |
| CasΦ.44 | GUUGAACCCUCAACAGAUUGCUCGGUAAGCCGAGAC | 2094 |
| CasΦ.45 | GUUGAACCUAGAUCAGAUGGCUCAGUACGCUGAGAC | 2089 |
| CasΦ.46 | GUCGGAACGCUCAACGAUUGCCCCUCACGAGGGGAC | 2074 |
| CasΦ.47 | GGUUGAACCCUCAACAGAUUGCUCGGUAAGCCGAGAC | 2084 |
| CasΦ.48 | GGUUGAACCCUCAACAGAUUGCUCGGUAAGCCGAGAC | 2084 |
| CasΦ.12 | AUUGCUCCUUACGAGGAGAC | 2656 |

[0363] TABLE 4 provides illustrative intermediary sequences that are useful in the compositions, systems and methods described herein.

TABLE 4
Exemplary intermediary sequence for CasM Effector Proteins

| Name | tracrRNA sequence |
|---|---|
| CasM.298706 | GGGGCGUCUUCCCGUCCCUAAAUCGAGAUAGCAGCCAUUUUUCUUCAU |
| | UUUUGAAGACGGUCUUGCACUCGAAAAGGUCAAG (SEQ ID NO: 385) |
| CasM.280604 | GGGGCGACUUCCCGCCCCAAAAUCGAGAAAGUGACUGUCAGACUUUGC |
| | UAUGCAAAGCAAGUAAUACACUCGAGAAGGUAAAGA (SEQ ID NO: 386) |
| CasM.281060 | AGGGCGACUUCCCGUCCUAAAAUCGAGAAAGUGACAAUUCAGUCUCGC |
| | AUUUCGAGCAUUGUAAUACACUCGAAAAGGUUAAG (SEQ ID NO: 387) |
| CasM.284933 | GGGGCGACUUCCCGUCCCAAAAUCGAGAAAGUGGUCGUAAGUCUCGAU |
| | CGGAUCGAAGCAGACAAUACACUCGAAAAGGUUAAGU (SEQ ID NO: 388) |
| CasM.287908 | GGGGCGACUUCCCGUCCCUAAAUCGAGAAAGUGGCGGUAAGACUUCGG |
| | UCUUCGAAGCGCGCAAUACACUCGAAAAGGUUAA (SEQ ID NO: 389) |
| CasM.288518 | GGGGCGACUUCCCGUCCCAAAAUCGAGAAAGUGACAGUAAUUCUUUGU |
| | UUUACAGAGGUUGUAAUACACUCGAUAAGGUUAAG (SEQ ID NO: 390) |
| CasM.293891 | GGGGCGACCUCCCGUCCCAAAAUCGAGAAAGUGGCCGUCAGACUUCUC |
| | GCUGAGAAGCACGCAAUACACUCGAAAAGGUAAAG (SEQ ID NO: 391) |
| CasM.294270 | AGGGCGACUUCCCGUCCUGAAAUCGAGAAAGUGACAAGGAAAGCGCAA |
| | UUUUGCGCCGUUGUAAUACACUCGAGAAGGUCAAG (SEQ ID NO: 392) |
| CasM.294491 | AGGGCGACUUCCCGUCCUAAAAUCGAGAUAGUGACAAGUCAGUCUCUU |
| | AUGAGGAGCAUUGUAAUACACUCGAGAAGGUCAAG (SEQ ID NO: 393) |
| CasM.295047 | GGGGCGACUUCCCGUCCCAAAAUCGAGAAAGUGGUCGUAAGUCUCGAU |
| | CGGAUCGAAGCAGACAAUACACUCGAAAAGGUUAAGU (SEQ ID NO: 388) |
| CasM.299588 | AGGGCGACUUCACGUCCUCAAAUCGAGAAAGUGAGCGUAAGACUUGGC |
| | UUCUGUCAAGCGGUUAAUACACUCGAGAAGGUUAA (SEQ ID NO: 394) |
| CasM.277328 | GGGGCGACUUCCCGUCCCGAAAUCGAGAAAGUGACCGUCAGACUCUGC |
| | UUUGCAGAGCAGGUAAUACACUCGAGAAGGUAAAG (SEQ ID NO: 395) |
| CasM.297894 | GGGGCGUCUUCCCGUCCCUAAAUCGAGAUAGCAGCCAUUUUUCUUCAU |
| | UUUUUGAAGACGGUCUUGCACUCGAAAAGGUCAAG (SEQ ID NO: 396) |
| CasM.291449 | CACGCTAGCTGAAAAGCAACCGCGTACACGCGGACGAACGGCCGACCTG |
| | CTCGGCCTGAAGGTTGAGAAGGTTATGTATAAGAGGAGAAAATCCCCCTT |
| | CATAATCGCTCACCAAGCTCCCAATTTACATATTTT (SEQ ID NO: 397) |
| CasM.291449 | CGGCCGACCUGCUCGGCCUGAAGGUUGAGAAGGUUAUGUAUAAGAGGA |
| | GAAAAUCCCCCUUCAUAAUCGCUCACCAAGCUCCCAAUUUACAUAUUU |
| | U (SEQ ID NO: 398) |
| CasM.297599 | TATTGCGCTAGCCATAATGGCAATCGCGTACAGGCAACTGAAGGCCGACC |
| | TGTACGGCCTTAAGGTTGAGAAGGCACATGTAAGTGGAAAAATGCTTTCC |
| | CGTTGTGTTCGCTCACCAAGCACACACGTTTTTTT (SEQ ID NO: 399) |
| CasM.297599 | GAAGGCCGACCUGUACGGCCUUAAGGUUGAGAAGGCACAUGUAAGUGG |
| | AAAAAUGCUUUCCCGUUGUGUUCGCUCACCAAGCACACACGUUUUUUU |
| | (SEQ ID NO: 400) |
| CasM.286588 | AGGTCGCCGTTTACGTTGCGTCACAAGGGCGCGCGGGCGACCGAAGGCC |
| | GATCTGTACGGCCTGCAGGTTGAGAAGGCACATATTAGAGGAAAATTGCT |
| | TCCCTTTGTGTTCGCTCACCGAGTATTCCTTGTTTTTT (SEQ ID NO: 401) |
| CasM.286588 | AUCUGUACGGCCUGCAGGUUGAGAAGGCACAUAUUAGAGGAAAAUUGC |
| | UUCCCUUUGUGUUCGCUCACCGAGUAUUCCUUGUUUUUU (SEQ ID NO: |
| | 402) |
| CasM.286910 | CAATGTTTCGCTAACCTTTAAGGTAATCGCGGGCAGGCGACTGAAGGCCG |
| | ACCTGTACGGCCTTAAGGCTGAGAAGGCACATGTAAGTGGAAAAATGCT |
| | TTCCCGTTGTGTTCGCTCACCAAGCACATTTGTTTTTTT (SEQ ID NO: 403) |
| CasM.286910 | GAAGGCCGACCUGUACGGCCUUAAGGCUGAGAAGGCACAUGUAAGUGG |
| | AAAAAUGCUUUCCCGUUGUGUUCGCUCACCAAGCACAUUUGUUUUUUU |
| | (SEQ ID NO: 404) |
| CasM.292335 | AGGCCGTTATCAACGTTTCGCGGAAGAGCGGACGAACGGCTGAAGGCCG |
| | ACCTGTACGGCCTAAAGGTTGAGAAGGCACATGTAAGAGGAAAATCGCT |
| | TCCCTTTGTGTTCGCTCACCGGGTACACGCGTTTTTTT (SEQ ID NO: 405) |
| CasM.292335 | AGGCCGACCUGUACGGCCUAAAGGUUGAGAAGGCACAUGUAAGAGGAA |
| | AAUCGCUUCCCUUUGUGUUCGCUCACCGGGUACACGCGUUUUUUU (SEQ |
| | ID NO: 406) |
| CasM.293576 | TCGTAAATGTTGCGCTAGCCATAATGGCAATCGCGTACAGGCAACTGAAG |
| | GCCGACCTGTACGGCCTTAAGGTTGAGAAGGCACATGTCAGTGGAAAAA |
| | TGCTTTCCCTTTGTGTTCGCTCACCAAGCACACGCGGTTTTTT (SEQ ID NO: |
| | 407) |
| CasM.293576 | AAGGCCGACCUGUACGGCCUUAAGGUUGAGAAGGCACAUGUCAGUGGA |
| | AAAAUGCUUUCCCUUUGUGUUCGCUCACCAAGCACACGCGGUUUUUU |
| | (SEQ ID NO: 408) |
| CasM.294537 | AATGTTTCGCTAACCTTTAAGGTAATCGCGGGCAGGCGACTGAAGGCCGA |
| | CCTGTACGGCCTTAAGGCTGAGAAGGCACATGTAAGTGGAAAAATGCTTT |
| | CCCGTTGTGTTCGCTCACCAAGCACATTTGTTTTTTT (SEQ ID NO: 409) |
| CasM.294537 | AAGGCCGACCUGUACGGCCUUAAGGCUGAGAAGGCACAUGUAAGUGGA |
| | AAAAUGCUUUCCCGUUGUGUUCGCUCACCAAGCACAUUUGUUUUUUU |
| | (SEQ ID NO: 410) |
| CasM.298538 | GGTCGTTGTAAAACGTAACGCTAGCCTTATGGCAATCGCGAACGAACGAC |
| | TGAAGGCCGACCTGTACGGCCTGAAGGATGAGAAGGCACATATTAGAGG |
| | AAAAAAATGGTTCCCTTTGTGACCGCTCACCAAACACATGTTTATTTTT |
| | (SEQ ID NO: 411) |
| CasM.298538 | AAGGCCGACCUGUACGGCCUGAAGGAUGAGAAGGCACAUAUUAGAGGA |
| | AAAAAAUGGUUCCCUUUGUGACCGCUCACCAAACACAUGUUUAUUUUU |
| | (SEQ ID NO: 412) |
| CasM.19924 | AUGAAUAGGAUUCGUCCUAUGGGGCAGUUGGUUGCCCUUAGCCUGAGG |
| | CAUUUAUUGCACUCGGGAAGUACCAUUUCUCA (SEQ ID NO: 413) |
| CasM.19952 | AUGAAUAGGAUUCGUCCUAUGGGGCAGUUGGUUGCCCUUAGCCUGAGG |
| | CAUUUAUUGCACUCGGGAAGUACCAUUUCUCA (SEQ ID NO: 413) |
| CasM.274559 | AUGAAUAGGAUUUAUCCUAUGGGGCAGUUGGUUGCCCUUAGCCUGAGG |
| | CAUUUAAUGCACUCGGGAAGUACCUUUUCUCA (SEQ ID NO: 414) |
| CasM.286251 | AAGAAUAGGAUUCAUCCUAUGGGGCAGUUGGUUGCCCUUAGCCUGAGG |
| | AAUUUAAUUCACUCGGGAAGUACCUUUCUCAU (SEQ ID NO: 415) |
| CasM.288480 | AUGAAUAGGAUUCGUCCUAUGGGGCAGUUGGUUGCCCUUAGCCUGAGG |
| | CAUUUAUUGCACUCGGGAAGUACCAUUUCUCA (SEQ ID NO: 413) |
| CasM.288668 | AUGGAUAGGAUUCGUCCUAUGGGGCAGUUGGGACCAUGUAAUGCCCUU |
| | AGCCUGAGGAAUUCAUUUCACUCGGGAAGUAU (SEQ ID NO: 416) |
| CasM.289206 | AUGAAUAGGAUUUAUCCUAUGGGGCAGUUGGUUGCCCUUAGCCUGAGG |
| | CAUUUAAUGCACUCGGGAAGUACCUUUUCUCA (SEQ ID NO: 414) |
| CasM.290598 | AUGAAUAGGAUUUAUCCUAUGGGGCAGUUGGUUGCCCUUAGCCUGAGG |
| | CAUUUAAUGCACUCGGGAAGUACCUUUUCUCA (SEQ ID NO: 414) |
| CasM.290816 | AUGAAUAGGAUUUAUCCUAUGGGGCAGUUGGAUGCCCUUAGCCUGAGG |
| | CAUUUAUUGCACUCGGGAAGUACCUUUUCUCA (SEQ ID NO: 417) |
| CasM.295071 | AAGAAUAGGAUUCAUCCUAUGGGGCAGUUGGUUGCCCUUAGCCUGAGG |
| | AAUUUAAUUCACUCGGGAAGUACCUUUCUCAU (SEQ ID NO: 415) |
| CasM.295231 | AUGAAUAGGAUUUAUCCUAUGGGGCAGUUGGAUGCCCUUAGCCUGAGG |
| | CAUUUAUUGCACUCGGGAAGUACCUUUUCUCA (SEQ ID NO: 417) |
| CasM.292139 | UAUUUUCUAAUGGGGUUGUUGGAAAGAGCUUUUACUGAAAUUUGUAA |
| | AGGUGCCCUGAACUUGAGAAUUGAAAAAUUACUCGAG (SEQ ID NO: 418) |
| CasM.292139 | AUGGGGUUGUUGGAAAGAGCUUUUACUGAAAUUUGUAAAGGUGCCCU |
| | GAACUUGAGAAUUGAAAAAUUACUCGAG (SEQ ID NO: 419) |
| CasM.279423 | AUGAAUAGGAUUUAUCCUAUGGGGCAGUUGGUUGCCCUUAGCCUGAGG |
| | CAUUUAAUGCACUCGGGAAGUACCUUUUCUCA (SEQ ID NO: 414) |
| CasM.20054 | TTCGGGCGGCTCGGCGTCCGTAAATCGAGAAAGAGCTTGTAATTCCTGAT |
| | TCTATCAGGTGAAGCAACACTCGGTAAGGTATAACAATACACATGTATAA |
| | TCCGTGTATTTAAGTTCATTTT (SEQ ID NO: 420) |
| CasM.20054 | UUCGGGCGGCUCGGCGUCCGUAAAUCGAGAAAGAGCUUGUAAUUCCUG |
| | AUUCUAUCAGGUGAAGCAACACUCGGUAAGGUAUAAC (SEQ ID NO: 421) |
| CasM.282673 | ATAAGGGCGGCTCAGCGTCCTAAAGTCGAGAAAGTATGCGTAAACTTCTT |
| | TCATAGAATTGCAGATACTCTCGGCAAGGTAAAAACCCTACAAATTTAAT |
| | CCTTGTAGGCGACTTATATTTGTGTATATTT (SEQ ID NO: 422) |
| CasM.282673 | AUAAGGGCGGCUCAGCGUCCUAAAGUCGAGAAAGUAUGCGUAAACUUC |
| | UUUCAUAGAAUUGCAGAUACUCUCGGCAAGGUAAAA (SEQ ID NO: 423) |
| CasM.282952 | ATTCTTTCCTCGGAAAGTGGTAGATACTCTCGGTAAGGTAAACTGTGTAT |
| | GAACAGTTTGAAATCCTGCACATAAAATCCGTGCAGGCATCTTATAGTTT |
| | TGTGCATCTTT (SEQ ID NO: 424) |
| CasM.282952 | AUUCUUUCCUCGGAAAGUGGUAGAUACUCUCGGUAAGGUAAACUGUGU |
| | AUGAACAGUUUGAAAUCCUGCACAUAAAAUCCGUGCAGGCAUC (SEQ ID |
| | NO: 425) |
| CasM.283262 | TTCGGGCGGCTCGGCGTCCGTAAACCGAGAAAGTATATGTAAGTCTGAAT |
| | TTATTCAGCGTTAGATACACTCGGTAAGGTTCAAACAATACATATTCAAT |
| | CCATGTATTCAGTATATTTGTACATTTTT (SEQ ID NO: 426) |
| CasM.283262 | UUCGGGCGGCUCGGCGUCCGUAAACCGAGAAAGUAUAUGUAAGUCUGA |
| | AUUUAUUCAGCGUUAGAUACACUCGGUAAGGUUCAAAC (SEQ ID NO: |
| | 427) |
| CasM.284833 | TTCAGGGCGACTCGGCGTCCTAAAATCGAGAAAGTGTACATAAATTTTTA |
| | ACAAAATACGGTAAATACTCTCGGTAAGGTTTTAACGTGCACATAATAAT |
| | CCGTGCAACAGGGTTACACTTTTGTGCAATTTT (SEQ ID NO: 428) |
| CasM.284833 | UUCAGGGCGACUCGGCGUCCUAAAAUCGAGAAAGUGUACAUAAAUUUU |
| | UAACAAAAUACGGUAAAUACUCUCGGUAAGGUUUUAAC (SEQ ID NO: |
| | 429) |
| CasM.287700 | UUCGGGCGGCUCGGCGUCCGUAAACCGAGAAAGUAUAUGUAAGUCUGA |
| | AUUUAUUCAGCGUUAGAUACACUCGGUAAGGUUUAAAC (SEQ ID NO: |
| | 430) |
| CasM.291507 | TTCAGGGCGACTCGGCGTCCTAAAATCGAGAAAGTGTACATAAGTTTTTA |
| | ACAAAATACGGTAAATACTCTCGGTAAGGTTTTAACGTGCACATAATAAT |
| | CCGTGCAACAGGGTTACACTTTTGTGCAATTTT (SEQ ID NO: 431) |
| CasM.291507 | UUCAGGGCGACUCGGCGUCCUAAAAUCGAGAAAGUGUACAUAAGUUUU |
| | UAACAAAAUACGGUAAAUACUCUCGGUAAGGUUUUAACG (SEQ ID NO: |
| | 432) |
| CasM.293410 | TATTAAGGGCGGCTCAGCGTCCTTAAGTCGAGAAAGTATACATAAATTTC |
| | TTATATAGAATAGTAGATACTCTCGGCAAGGTATAAACCCTACAAATTTA |
| | ATCCTTGTAGGCAACTTATATTTGTATTTATTT (SEQ ID NO: 433) |
| CasM.293410 | UAUUAAGGGCGGCUCAGCGUCCUUAAGUCGAGAAAGUAUACAUAAAUU |
| | UCUUAUAUAGAAUAGUAGAUACUCUCGGCAAGGUAUAAACC (SEQ ID |
| | NO: 434) |
| CasM.295105 | TTTCGGGCGGCTCGGCGTCCGTAAACCGAGAAAGTATATGTAAGTCTGAA |
| | TTTATTCAGCGTTAGATACACTCGGTAAGGTTCAAACAATACATATTCAA |
| | TCCATGTATTCAGTATATTTGTACATTTTT (SEQ ID NO: 435) |
| CasM.295105 | UUUCGGGCGGCUCGGCGUCCGUAAACCGAGAAAGUAUAUGUAAGUCUG |
| | AAUUUAUUCAGCGUUAGAUACACUCGGUAAGGUUCAAAC (SEQ ID NO: |
| | 436) |
| CasM.295187 | ATATTAAGGGCGGCTCAGCGTCCTTAAGTCGAGAAAGTATACATAAATTT |
| | CTTATATAGAATAGTAGATACTCTCGGCAAGGTATAAACCCTACAAATTT |
| | AATCCTTGTAGGCAACTTATATTTGTATTTATTT (SEQ ID NO: 437) |
| CasM.295187 | AUAUUAAGGGCGGCUCAGCGUCCUUAAGUCGAGAAAGUAUACAUAAAU |
| | UUCUUAUAUAGAAUAGUAGAUACUCUCGGCAAGGUAUAAAC (SEQ ID |
| | NO: 438) |
| CasM.295929 | AAACAAGGGCGGCTCAACGTCCTAGAATCGAGAAAGTATGCGTAAGACT |
| | TATTTATTGAGCGGTAGATACTCTCGGTAAGGTATAAATTCCACAATGAA |
| | AATCCTGTGGACACCGTATAATATGTGCATGTTT (SEQ ID NO: 439) |
| CasM.295929 | AAACAAGGGCGGCUCAACGUCCUAGAAUCGAGAAAGUAUGCGUAAGAC |
| | UUAUUUAUUGAGCGGUAGAUACUCUCGGUAAGGUAUAAAUUC (SEQ ID |
| | NO: 440) |

[0364] TABLE 5, TABLE 5.1, TABLE 6, TABLE 6.1, TABLE 7, and TABLE 7.1 provide illustrative spacer sequences that are useful in the compositions, systems and methods described herein.

TABLE 5
Spacer sequences of gRNAs (DNA sequences)
targeting human TRAC in T cells

| | Spacer sequence (5′ → 3′), | | SEQ ID |
|---|---|---|---|
| Name | shown as DNA | Target | NO |
| R3040 | TGGATATCTGTGGGACAAGA | TRAC | 227 |
| R3041 | TCCCACAGATATCCAGAACC | TRAC | 228 |
| R3042 | GAGTCTCTCAGCTGGTACAC | TRAC | 229 |
| R3043 | AGAGTCTCTCAGCTGGTACA | TRAC | 230 |
| R3044 | TCACTGGATTTAGAGTCTCT | TRAC | 231 |
| R3045 | AGAATCAAAATCGGTGAATA | TRAC | 232 |
| R3046 | GAGAATCAAAATCGGTGAAT | TRAC | 233 |
| R3047 | ACCGATTTTGATTCTCAAAC | TRAC | 234 |
| R3048 | TTTGAGAATCAAAATCGGTG | TRAC | 235 |
| R3049 | GTTTGAGAATCAAAATCGGT | TRAC | 236 |
| R3050 | TGATTCTCAAACAAATGTGT | TRAC | 237 |
| R3051 | GATTCTCAAACAAATGTGTC | TRAC | 238 |
| R3052 | ATTCTCAAACAAATGTGTCA | TRAC | 239 |
| R3053 | TGACACATTTGTTTGAGAAT | TRAC | 240 |
| R3054 | TCAAACAAATGTGTCACAAA | TRAC | 241 |
| R3055 | GTGACACATTTGTTTGAGAA | TRAC | 242 |
| R3056 | CTTTGTGACACATTTGTTTG | TRAC | 243 |
| R3057 | TGATGTGTATATCACAGACA | TRAC | 244 |
| R3058 | TCTGTGATATACACATCAGA | TRAC | 245 |
| R3059 | GTCTGTGATATACACATCAG | TRAC | 246 |
| R3060 | TGTCTGTGATATACACATCA | TRAC | 247 |
| R3061 | AAGTCCATAGACCTCATGTC | TRAC | 248 |
| R3062 | CTCTTGAAGTCCATAGACCT | TRAC | 249 |
| R3063 | AAGAGCAACAGTGCTGTGGC | TRAC | 250 |
| R3064 | CTCCAGGCCACAGCACTGTT | TRAC | 251 |
| R3065 | TTGCTCCAGGCCACAGCACT | TRAC | 252 |
| R3066 | GTTGCTCCAGGCCACAGCAC | TRAC | 253 |
| R3067 | CACATGCAAAGTCAGATTTG | TRAC | 254 |
| R3068 | GCACATGCAAAGTCAGATTT | TRAC | 255 |
| R3069 | GCATGTGCAAACGCCTTCAA | TRAC | 256 |
| R3070 | AAGGCGTTTGCACATGCAAA | TRAC | 257 |
| R3071 | CATGTGCAAACGCCTTCAAC | TRAC | 258 |
| R3072 | TTGAAGGCGTTTGCACATGC | TRAC | 259 |
| R3073 | AACAACAGCATTATTCCAGA | TRAC | 260 |
| R3074 | TGGAATAATGCTGTTGTTGA | TRAC | 261 |
| R3075 | TTCCAGAAGACACCTTCTTC | TRAC | 262 |
| R3076 | CAGAAGACACCTTCTTCCCC | TRAC | 263 |
| R3077 | CCTGGGCTGGGGAAGAAGGT | TRAC | 264 |
| R3078 | TTCCCCAGCCCAGGTAAGGG | TRAC | 265 |
| R3079 | CCCAGCCCAGGTAAGGGCAG | TRAC | 266 |
| R3080 | TAAAAGGAAAAACAGACATT | TRAC | 267 |
| R3081 | CTAAAAGGAAAAACAGACAT | TRAC | 268 |
| R3082 | TTCCTTTTAGAAAGTTCCTG | TRAC | 269 |
| R3083 | TCCTTTTAGAAAGTTCCTGT | TRAC | 270 |
| R3084 | CCTTTTAGAAAGTTCCTGTG | TRAC | 271 |
| R3085 | CTTTTAGAAAGTTCCTGTGA | TRAC | 272 |
| R3086 | TAGAAAGTTCCTGTGATGTC | TRAC | 273 |
| R3136 | AGAAAGTTCCTGTGATGTCA | TRAC | 274 |
| R3137 | GAAAGTTCCTGTGATGTCAA | TRAC | 275 |
| R3138 | ACATCACAGGAACTTTCTAA | TRAC | 276 |
| R3139 | CTGTGATGTCAAGCTGGTCG | TRAC | 277 |
| R3140 | TCGACCAGCTTGACATCACA | TRAC | 278 |
| R3141 | CTCGACCAGCTTGACATCAC | TRAC | 279 |
| R3142 | TCTCGACCAGCTTGACATCA | TRAC | 280 |
| R3143 | AAAGCTTTTCTCGACCAGCT | TRAC | 281 |
| R3144 | CAAAGCTTTTCTCGACCAGC | TRAC | 282 |
| R3145 | CCTGTTTCAAAGCTTTTCTC | TRAC | 283 |
| R3146 | GAAACAGGTAAGACAGGGGT | TRAC | 284 |
| R3147 | AAACAGGTAAGACAGGGGTC | TRAC | 285 |

TABLE 5.1
Spacer sequences of gRNAs targeting human TRAC in
T cells

| SEQ | | SEQ | |
|---|---|---|---|
| ID | | ID | |
| NO | Spacer Sequence | NO | Spacer Sequence |
| 1962 | UCACAAAGUAAGGAUUCUGA | 2023 | UCACUGGAUUUAGAGUCUCU |
| 1963 | UGGACUUCAAGAGCAACAGU | 2024 | AGAAUCAAAAUCGGUGAAUA |
| 1964 | AUUCUCAAACAAAUGUGUCA | 2025 | GAGAAUCAAAAUCGGUGAAU |
| 1965 | ACUUUGCAUGUGCAAACGCC | 2026 | ACCGAUUUUGAUUCUCAAAC |
| 1966 | CAAACGCCUUCAACAACAGC | 2027 | UUUGAGAAUCAAAAUCGGUG |
| 1967 | UAUAUCACAGACAAAACUGU | 2028 | GUUUGAGAAUCAAAAUCGGU |
| 1968 | AAUCCAGUGACAAGUCUGUC | 2029 | UGAUUCUCAAACAAAUGUGU |
| 1969 | AUGUGUAUAUCACAGACAAA | 2030 | GAUUCUCAAACAAAUGUGUC |
| 1970 | CAUGUGCAAACGCCUUCAAC | 2031 | UGACACAUUUGUUUGAGAAU |
| 1971 | UCACAGACAAAACUGUGCUA | 2032 | UCAAACAAAUGUGUCACAAA |
| 1972 | UAUCACAGACAAAACUGUGC | 2033 | GUGACACAUUUGUUUGAGAA |
| 1973 | UCUGCCUAUUCACCGAUUUU | 2034 | CUUUGUGACACAUUUGUUUG |
| 1974 | GCCUGGAGCAACAAAUCUGA | 2035 | UGAUGUGUAUAUCACAGACA |
| 1975 | CCAGCUGAGAGACUCUAAAU | 2036 | GUCUGUGAUAUACACAUCAG |
| 1976 | CCUAUUCACCGAUUUUGAUU | 2037 | UGUCUGUGAUAUACACAUCA |
| 1977 | CUAGACAUGAGGUCUAUGGA | 2038 | AAGUCCAUAGACCUCAUGUC |
| 1978 | GACUUCAAGAGCAACAGUGC | 2039 | CUCUUGAAGUCCAUAGACCU |
| 1979 | GCACAGUUUUGUCUGUGAUA | 2040 | AAGAGCAACAGUGCUGUGGC |
| 1980 | AGAAUCAAAAUCGGUGAAUA | 2041 | CUCCAGGCCACAGCACUGUU |
| 1981 | CACAUCAGAAUCCUUACUUU | 2042 | GUUGCUCCAGGCCACAGCAC |
| 1982 | UGAUAUACACAUCAGAAUCC | 2043 | GCACAUGCAAAGUCAGAUUU |
| 1983 | ACACAUUUGUUUGAGAAUCA | 2044 | GCAUGUGCAAACGCCUUCAA |
| 1984 | UGACACAUUUGUUUGAGAAU | 2045 | AAGGCGUUUGCACAUGCAAA |
| 1985 | GAGUCUCUCAGCUGGUACAC | 2046 | UUGAAGGCGUUUGCACAUGC |
| 1986 | UUGCUCCAGGCCACAGCACU | 2047 | AACAACAGCAUUAUUCCAGA |
| 1987 | CACAUGCAAAGUCAGAUUUG | 2048 | UGGAAUAAUGCUGUUGUUGA |
| 1988 | UUUGAGAAUCAAAAUCGGUG | 2049 | UUCCAGAAGACACCUUCUUC |
| 1989 | AUAUACACAUCAGAAUCCUU | 2050 | CAGAAGACACCUUCUUCCCC |
| 1990 | GAAUAAUGCUGUUGUUGAAG | 2051 | CCUGGGCUGGGGAAGAAGGU |
| 1991 | UCUGUGAUAUACACAUCAGA | 2052 | UUCCCCAGCCCAGGUAAGGG |
| 1992 | AUGUCAAGCUGGUCGAGAAA | 2053 | CCCAGCCCAGGUAAGGGCAG |
| 1993 | CUCAUGACGCUGCGGCUGUG | 2054 | UAAAAGGAAAAACAGACAUU |
| 1994 | AUCUGCUCAUGACGCUGCGG | 2055 | CUAAAAGGAAAAACAGACAU |
| 1995 | CUCCCUCGCUCCUUCCUCUG | 2056 | UUCCUUUUAGAAAGUUCCUG |
| 1996 | GGCGUGUUGUAUGUCCUGCU | 2057 | UCCUUUUAGAAAGUUCCUGU |
| 1997 | CACAUUCCCUCCUGCUCCCC | 2058 | CCUUUUAGAAAGUUCCUGUG |
| 1998 | CAAGAUUGUAAGACAGCCUG | 2059 | CUUUUAGAAAGUUCCUGUGA |
| 1999 | CAUUGCCCCUCUUCUCCCUC | 2060 | UAGAAAGUUCCUGUGAUGUC |
| 2000 | UAUCUGGGCGUGUUGUAUGU | 2061 | AGAAAGUUCCUGUGAUGUCA |
| 2001 | UGUCCUGCUGCCGAUGCCUU | 2062 | GAAAGUUCCUGUGAUGUCAA |
| 2002 | AGACAGCCUGUGCUCCCUCG | 2063 | ACAUCACAGGAACUUUCUAA |
| 2003 | UUCCCUUAUUGCUGCUUGUC | 2064 | CUGUGAUGUCAAGCUGGUCG |
| 2004 | AUUAAGAUUGCUGAAGAGCU | 2065 | UCGACCAGCUUGACAUCACA |
| 2005 | CCCCCCCGGCAAUGCCACCA | 2066 | CUCGACCAGCUUGACAUCAC |
| 2006 | UCUGGGCGUGUUGUAUGUCC | 2067 | UCUCGACCAGCUUGACAUCA |
| 2007 | UGAUUAAGAUUGCUGAAGAG | 2068 | AAAGCUUUUCUCGACCAGCU |
| 2008 | GGUCCUGCAGAAUGUUGUGA | 2069 | CAAAGCUUUUCUCGACCAGC |
| 2009 | UGCCCCCCCGGCAAUGCCAC | 2070 | CCUGUUUCAAAGCUUUUCUC |
| 2010 | CUGUGUAUCUGGGCGUGUUG | 2071 | GAAACAGGUAAGACAGGGGU |
| 2011 | UUUGGAGAGGGAGAAGAGGG | 2072 | AAACAGGUAAGACAGGGGUC |
| 2012 | CAGGACCUAGAGCCCAAGAG | 1358 | UCCCACAGAUAUCCAGAACC |
| 2013 | CCGUGAAUGUCAGGCAGUGA | 1353 | GAGUCUCUCAGCUGGUACAC |
| 2014 | GAGAGGGAGAAGAGGGGCAA | 1359 | AGAGUCUCUCAGCUGGUACA |
| 2015 | GGGAGCAGGAGGGAAUGUGC | 1360 | AAGUCCAUAGACCUCAUGUC |
| 2016 | CACAGCCAGGGGAGGCUGCA | 1361 | AAGAGCAACAGUGCUGUGGC |
| 2017 | GGAUGGCGGAGGCAGUCUCU | 1362 | GUUGCUCCAGGCCACAGCAC |
| 2018 | UGGGAUGGCGGAGGCAGUCU | 1363 | GCACAUGCAAAGUCAGAUUU |
| 2019 | GCAGCUCUUCAGCAAUCUUA | 1364 | GCAUGUGCAAACGCCUUCAA |
| 2020 | UGGAUAUCUGUGGGACAAGA | 1365 | CUAAAAGGAAAAACAGACAU |
| 2021 | UCCCACAGAUAUCCAGAACC | 1366 | CUCGACCAGCUUGACAUCAC |
| 2022 | AGAGUCUCUCAGCUGGUACA | 2659 | GAGUCUCUCAGCUGGUAC |

TABLE 6
Spacer sequences of gRNAs (DNA sequences)
targeting human B2M in T cells

| | Spacer Sequence | | |
|---|---|---|---|
| | (5′ --> 3′), | | SEQ |
| Name | shown as DNA | Target | ID NO |
| R3087 | AATATAAGTGGAGGCGTCGC | B2M | 286 |
| R3088 | ATATAAGTGGAGGCGTCGCG | B2M | 287 |
| R3089 | AGGAATGCCCGCCAGCGCGA | B2M | 288 |
| R3090 | CTGAAGCTGACAGCATTCGG | B2M | 289 |
| R3091 | GGGCCGAGATGTCTCGCTCC | B2M | 290 |
| R3092 | GCTGTGCTCGCGCTACTCTC | B2M | 291 |
| R3093 | CTGGCCTGGAGGCTATCCAG | B2M | 292 |
| R3094 | TGGCCTGGAGGCTATCCAGC | B2M | 293 |
| R3095 | ATGTGTCTTTTCCCGATATT | B2M | 294 |
| R3096 | TCCCGATATTCCTCAGGTAC | B2M | 295 |
| R3097 | CCCGATATTCCTCAGGTACT | B2M | 296 |
| R3098 | CCGATATTCCTCAGGTACTC | B2M | 297 |
| R3099 | GAGTACCTGAGGAATATCGG | B2M | 298 |
| R3100 | GGAGTACCTGAGGAATATCG | B2M | 299 |
| R3101 | CTCAGGTACTCCAAAGATTC | B2M | 300 |
| R3102 | AGGTTTACTCACGTCATCCA | B2M | 301 |
| R3103 | ACTCACGTCATCCAGCAGAG | B2M | 302 |
| R3104 | CTCACGTCATCCAGCAGAGA | B2M | 303 |
| R3105 | TCTGCTGGATGACGTGAGTA | B2M | 304 |
| R3106 | CATTCTCTGCTGGATGACGT | B2M | 305 |
| R3107 | CCATTCTCTGCTGGATGACG | B2M | 306 |
| R3108 | ACTTTCCATTCTCTGCTGGA | B2M | 307 |
| R3109 | GACTTTCCATTCTCTGCTGG | B2M | 308 |
| R3110 | AGGAAATTTGACTTTCCATT | B2M | 309 |
| R3111 | CCTGAATTGCTATGTGTCTG | B2M | 310 |
| R3112 | CTGAATTGCTATGTGTCTGG | B2M | 311 |
| R3113 | CTATGTGTCTGGGTTTCATC | B2M | 312 |
| R3114 | AATGTCGGATGGATGAAACC | B2M | 313 |
| R3115 | CATCCATCCGACATTGAAGT | B2M | 314 |
| R3116 | ATCCATCCGACATTGAAGTT | B2M | 315 |
| R3117 | AGTAAGTCAACTTCAATGTC | B2M | 316 |
| R3118 | TTCAGTAAGTCAACTTCAAT | B2M | 317 |
| R3119 | AAGTTGACTTACTGAAGAAT | B2M | 318 |
| R3120 | ACTTACTGAAGAATGGAGAG | B2M | 319 |
| R3121 | TCTCTCCATTCTTCAGTAAG | B2M | 320 |
| R3122 | CTGAAGAATGGAGAGAGAAT | B2M | 321 |
| R3123 | AATTCTCTCTCCATTCTTCA | B2M | 322 |
| R3124 | CAATTCTCTCTCCATTCTTC | B2M | 323 |
| R3125 | TCAATTCTCTCTCCATTCTT | B2M | 324 |
| R3126 | TTCAATTCTCTCTCCATTCT | B2M | 325 |
| R3127 | AAAAAGTGGAGCATTCAGAC | B2M | 326 |
| R3128 | CTGAAAGACAAGTCTGAATG | B2M | 327 |
| R3129 | AGACTTGTCTTTCAGCAAGG | B2M | 328 |
| R3130 | TCTTTCAGCAAGGACTGGTC | B2M | 329 |
| R3131 | CAGCAAGGACTGGTCTTTCT | B2M | 330 |
| R3132 | AGCAAGGACTGGTCTTTCTA | B2M | 331 |
| R3133 | CTATCTCTTGTACTACACTG | B2M | 332 |
| R3134 | TATCTCTTGTACTACACTGA | B2M | 333 |
| R3135 | AGTGTAGTACAAGAGATAGA | B2M | 334 |
| R3148 | TACTACACTGAATTCACCCC | B2M | 335 |
| R3149 | AGTGGGGGTGAATTCAGTGT | B2M | 336 |
| R3150 | CAGTGGGGGTGAATTCAGTG | B2M | 337 |
| R3151 | TCAGTGGGGGTGAATTCAGT | B2M | 338 |
| R3152 | TTCAGTGGGGGTGAATTCAG | B2M | 339 |
| R3153 | ACCCCCACTGAAAAAGATGA | B2M | 340 |
| R3154 | ACACGGCAGGCATACTCATC | B2M | 341 |
| R3155 | GGCTGTGACAAAGTCACATG | B2M | 342 |
| R3156 | GTCACAGCCCAAGATAGTTA | B2M | 343 |
| R3157 | TCACAGCCCAAGATAGTTAA | B2M | 344 |
| R3158 | ACTATCTTGGGCTGTGACAA | B2M | 345 |
| R3159 | CCCCACTTAACTATCTTGGG | B2M | 346 |

TABLE 6.1
Spacer sequences of gRNAs targeting human B2M

| SEQ | | SEQ | |
|---|---|---|---|
| ID | | ID | |
| NO | Spacer Sequence | NO | Spacer Sequence |
| 1626 | CUCGCGCUACUCUCUCUUUC | 1695 | AAUAUAAGUGGAGGCGUCGC |
| 1627 | GGUUUCAUCCAUCCGACAUU | 1696 | AUAUAAGUGGAGGCGUCGCG |
| 1628 | CUACACUGAAUUCACCCCCA | 1697 | AGGAAUGCCCGCCAGCGCGA |
| 1629 | UCUCUUGUACUACACUGAAU | 1698 | CUGAAGCUGACAGCAUUCGG |
| 1630 | CUCACGUCAUCCAGCAGAGA | 1699 | GGGCCGAGAUGUCUCGCUCC |
| 1631 | UGUCUGGGUUUCAUCCAUCC | 1700 | GCUGUGCUCGCGCUACUCUC |
| 1632 | CCUGCCGUGUGAACCAUGUG | 1701 | CUGGCCUGGAGGCUAUCCAG |
| 1375 | UCACAGCCCAAGAUAGUUAA | 1702 | UGGCCUGGAGGCUAUCCAGC |
| 1633 | ACUUUGUCACAGCCCAAGAU | 1703 | AUGUGUCUUUUCCCGAUAUU |
| 1634 | UCUGGGUUUCAUCCAUCCGA | 1704 | UCCCGAUAUUCCUCAGGUAC |
| 1635 | AACCAUGUGACUUUGUCACA | 1705 | CCCGAUAUUCCUCAGGUACU |
| 1636 | AAUGCUCCACUUUUUCAAUU | 1706 | CCGAUAUUCCUCAGGUACUC |
| 1637 | ACUUUCCAUUCUCUGCUGGA | 1707 | GAGUACCUGAGGAAUAUCGG |
| 1638 | ACAAAGUCACAUGGUUCACA | 1708 | GGAGUACCUGAGGAAUAUCG |
| 1639 | GUACAAGAGAUAGAAAGACC | 1709 | CUCAGGUACUCCAAAGAUUC |
| 1640 | CUGGAUGACGUGAGUAAACC | 1710 | AGGUUUACUCACGUCAUCCA |
| 1641 | GUUUAUUUUUGUUCCACAAG | 1711 | ACUCACGUCAUCCAGCAGAG |
| 1642 | CACAAAAUGUAGGGUUAUAA | 1712 | UCUGCUGGAUGACGUGAGUA |
| 1643 | GGGGAAAAUUUAGAAAUAUA | 1713 | CAUUCUCUGCUGGAUGACGU |
| 1644 | CUUGCUUGCUUUUUAAUAUU | 1714 | CCAUUCUCUGCUGGAUGACG |
| 1645 | CUUUGAGUGCUGUCUCCAUG | 1715 | GACUUUCCAUUCUCUGCUGG |
| 1646 | AUAAAGUAAGGCAUGGUUGU | 1716 | AGGAAAUUUGACUUUCCAUU |
| 1647 | GUUAAUCUGGUUUAUUUUUG | 1717 | CCUGAAUUGCUAUGUGUCUG |
| 1648 | AUGUAUCUGAGCAGGUUGCU | 1718 | CUGAAUUGCUAUGUGUCUGG |
| 1649 | CUUAGAAUUUGGGGGAAAAU | 1719 | CUAUGUGUCUGGGUUUCAUC |
| 1650 | GAUUGGAUGAAUUCCAAAUU | 1720 | AAUGUCGGAUGGAUGAAACC |
| 1651 | UGCACAAAAUGUAGGGUUAU | 1721 | CAUCCAUCCGACAUUGAAGU |
| 1652 | GAAAUAUAAUUGACAGGAUU | 1722 | AUCCAUCCGACAUUGAAGUU |
| 1653 | AGUGCUGUCUCCAUGUUUGA | 1723 | AGUAAGUCAACUUCAAUGUC |
| 1654 | GGAGGGCUGGCAACUUAGAG | 1724 | UUCAGUAAGUCAACUUCAAU |
| 1655 | AACUCUUCAAUCUCUUGCAC | 1725 | AAGUUGACUUACUGAAGAAU |
| 1656 | AUAAUGUUAACAUGGACAUG | 1726 | ACUUACUGAAGAAUGGAGAG |
| 1657 | CUUAUACACUUACACUUUAU | 1727 | UCUCUCCAUUCUUCAGUAAG |
| 1658 | AUAUUGAUAUGCUUAUACAC | 1728 | CUGAAGAAUGGAGAGAGAAU |
| 1659 | GGGUUAUAAUAAUGUUAACA | 1729 | AAUUCUCUCUCCAUUCUUCA |
| 1660 | CAUUUGAUAAAGUAAGGCAU | 1730 | CAAUUCUCUCUCCAUUCUUC |
| 1661 | UUUUUGUUCCACAAGUUAAA | 1731 | UCAAUUCUCUCUCCAUUCUU |
| 1662 | UUCCACAAGUUAAAUAAAUC | 1732 | UUCAAUUCUCUCUCCAUUCU |
| 1663 | UCUGAGCAGGUUGCUCCACA | 1733 | AAAAAGUGGAGCAUUCAGAC |
| 1664 | AUUCUACUUUGAGUGCUGUC | 1734 | CUGAAAGACAAGUCUGAAUG |
| 1665 | AGCAGGUUGCUCCACAGGUA | 1735 | AGACUUGUCUUUCAGCAAGG |
| 1666 | AUUGACAGGAUUAUUGGAAA | 1736 | UCUUUCAGCAAGGACUGGUC |
| 1667 | AAGAUGCCGCAUUUGGAUUG | 1737 | CAGCAAGGACUGGUCUUUCU |
| 1668 | AUGAAUGAAACAUUUUGUCA | 1738 | AGCAAGGACUGGUCUUUCUA |
| 1669 | CAUACUCUGCUUAGAAUUUG | 1739 | CUAUCUCUUGUACUACACUG |
| 1670 | UAAUUCUACUUUGAGUGCUG | 1740 | UAUCUCUUGUACUACACUGA |
| 1671 | CACUUACACUUUAUGCACAA | 1741 | AGUGUAGUACAAGAGAUAGA |
| 1672 | ACCAAGAUGUUGAUGUUGGA | 1742 | UACUACACUGAAUUCACCCC |
| 1673 | CAUAAAGUGUAAGUGUAUAA | 1743 | AGUGGGGGUGAAUUCAGUGU |
| 1674 | GAACAAAAAUAAACCAGAUU | 1744 | CAGUGGGGGUGAAUUCAGUG |
| 1675 | CUCCCCACCUCUAAGUUGCC | 1745 | UCAGUGGGGGUGAAUUCAGU |
| 1676 | AGUUGCCAGCCCUCCUAGAG | 1746 | UUCAGUGGGGGUGAAUUCAG |
| 1677 | AAUUGGAAGUUAACUUAUGC | 1747 | ACCCCCACUGAAAAAGAUGA |
| 1678 | AGCAGAGUAUGUAAAUUGGA | 1748 | ACACGGCAGGCAUACUCAUC |
| 1679 | ACAAAUUUCCAAUAAUCCUG | 1749 | GGCUGUGACAAAGUCACAUG |
| 1680 | CACGCUUAACUAUCUUAACA | 1750 | GUCACAGCCCAAGAUAGUUA |
| 1681 | UUUAACUUGUGGAACAAAAA | 1751 | ACUAUCUUGGGCUGUGACAA |
| 1682 | UGAUUUAUUUAACUUGUGGA | 1752 | CCCCACUUAACUAUCUUGGG |
| 1683 | GAGCAACCUGCUCAGAUACA | 1367 | AUAUAAGUGGAGGCGUCGCG |
| 1684 | ACUUGUGGAACAAAAAUAAA | 1368 | GGGCCGAGAUGUCUCGCUCC |
| 1685 | AGUGCAAGAGAUUGAAGAGU | 1369 | UGGCCUGGAGGCUAUCCAGC |
| 1686 | AGUGUAUAAGCAUAUCAAUA | 1370 | AAGUUGACUUACUGAAGAAU |
| 1687 | AUUUAUUUAACUUGUGGAAC | 1371 | AGCAAGGACUGGUCUUUCUA |
| 1688 | UGACAAAAUGUUUCAUUCAU | 1372 | AGUGGGGGUGAAUUCAGUGU |
| 1689 | UGCAUAAAGUGUAAGUGUAU | 1351 | CAGUGGGGGUGAAUUCAGUG |
| 1690 | AAGAAGAUCAUGUCCAUGUU | 1373 | GGCUGUGACAAAGUCACAUG |
| 1691 | AAUUUUCCCCCAAAUUCUAA | 1374 | GUCACAGCCCAAGAUAGUUA |
| 1692 | GAAUUCAUCCAAUCCAAAUG | 1375 | UCACAGCCCAAGAUAGUUAA |
| 1693 | UUUCUAAAUUUUCCCCCAAA | 1355 | CAGUGGGGGUGAAUUCA |
| 1694 | ACCCUACAUUUUGUGCAUAA | 1368 | GGGCCGAGAUGUCUCGCUCC |
| 2657 | GGGCCGAGAUGUCUCGC | 2658 | AGCAAGGACUGGUCUUU |

TABLE 7
Spacer sequences of gRNAs (DNA sequences)
targeting human CIITA

| | Spacer sequence (5′ --> 3′), | | |
|---|---|---|---|
| Name | shown as DNA | Target | SEQ ID NO |
| R4503 C2TA_T1.1 | CTACACAATGCGTTGCCTGG | CIITA | 446 |
| R4504 C2TA_T1.2 | GGGCTCTGACAGGTAGGACC | CIITA | 447 |
| R4505 C2TA_T1.3 | TGTAGGAATCCCAGCCAGGC | CIITA | 448 |
| R4506 C2TA_T1.8 | CCTGGCTCCACGCCCTGCTG | CIITA | 449 |
| R4507 C2TA_T1.9 | GGGAAGCTGAGGGCACGAGG | CIITA | 450 |
| R4508 C2TA_T2.1 | ACAGCGATGCTGACCCCCTG | CIITA | 451 |
| R4509 C2TA_T2.2 | TTAACAGCGATGCTGACCCC | CIITA | 452 |
| R4510 C2TA_T2.3 | TATGACCAGATGGACCTGGC | CIITA | 453 |
| R4511 C2TA_T2.4 | GGGCCCCTAGAAGGTGGCTA | CIITA | 454 |
| R4512 C2TA_T2.5 | TAGGGGCCCCAACTCCATGG | CIITA | 455 |
| R4513 C2TA_T2.6 | AGAAGCTCCAGGTAGCCACC | CIITA | 456 |
| R4514 C2TA_T2.7 | TCCAGCCAGGTCCATCTGGT | CIITA | 457 |
| R4515 C2TA_T2.8 | TTCTCCAGCCAGGTCCATCT | CIITA | 458 |
| R5200 | AGCAGGCTGTTGTGTGACAT | CIITA | 459 |
| R5201 | CATGTCACACAACAGCCTGC | CIITA | 460 |
| R5202 | TGTGACATGGAAGGTGATGA | CIITA | 461 |
| R5203 | ATCACCTTCCATGTCACACA | CIITA | 462 |
| R5204 | GCATAAGCCTCCCTGGTCTC | CIITA | 463 |
| R5205 | CAGGACTCCCAGCTGGAGGG | CIITA | 464 |
| R5206 | CTCAGGCCCTCCAGCTGGGA | CIITA | 465 |
| R5207 | TGCTGGCATCTCCATACTCT | CIITA | 466 |
| R5208 | TGCCCAACTTCTGCTGGCAT | CIITA | 467 |
| R5209 | CTGCCCAACTTCTGCTGGCA | CIITA | 468 |
| R5210 | TCTGCCCAACTTCTGCTGGC | CIITA | 469 |
| R5211 | TGACTTTTCTGCCCAACTTC | CIITA | 470 |
| R5212 | CTGACTTTTCTGCCCAACTT | CIITA | 471 |
| R5213 | TCTGACTTTTCTGCCCAACT | CIITA | 472 |
| R5214 | CCAGAGGAGCTTCCGGCAGA | CIITA | 473 |
| R5215 | AGGTCTGCCGGAAGCTCCTC | CIITA | 474 |
| R5216 | CGGCAGACCTGAAGCACTGG | CIITA | 475 |
| R5217 | CAGTGCTTCAGGTCTGCCGG | CIITA | 476 |
| R5218 | AACAGCGCAGGCAGTGGCAG | CIITA | 477 |
| R5219 | AACCAGGAGCCAGCCTCCGG | CIITA | 478 |
| R5220 | TCCAGGCGCATCTGGCCGGA | CIITA | 479 |
| R5221 | CTCCAGGCGCATCTGGCCGG | CIITA | 480 |
| R5222 | TCTCCAGGCGCATCTGGCCG | CIITA | 481 |
| R5223 | CTCCAGTTCCTCGTTGAGCT | CIITA | 482 |
| R5224 | TCCAGTTCCTCGTTGAGCTG | CIITA | 483 |
| R5225 | AGGCAGCTCAACGAGGAACT | CIITA | 484 |
| R5226 | CTCGTTGAGCTGCCTGAATC | CIITA | 485 |
| R5227 | AGCTGCCTGAATCTCCCTGA | CIITA | 486 |
| R5228 | GTCCCCACCATCTCCACTCT | CIITA | 487 |
| R5229 | TCCCCACCATCTCCACTCTG | CIITA | 488 |
| R5230 | CCAGAGCCCATGGGGCAGAG | CIITA | 489 |
| R5231 | GCCAGAGCCCATGGGGCAGA | CIITA | 490 |
| R5232 | CAGCCTCAGAGATTTGCCAG | CIITA | 491 |
| R5233 | GGAGGCCGTGGACAGTGAAT | CIITA | 492 |
| R5234 | ACTGTCCACGGCCTCCCAAC | CIITA | 493 |
| R5235 | GCTCCATCAGCCACTGACCT | CIITA | 494 |
| R5236 | AGGCATGCTGGGCAGGTCAG | CIITA | 495 |
| R5237 | CTCGGGAGGTCAGGGCAGGT | CIITA | 496 |
| R5238 | GCTCGGGAGGTCAGGGCAGG | CIITA | 497 |
| R5239 | GAGACCTCTCCAGCTGCCGG | CIITA | 498 |
| R5240 | TTGGAGACCTCTCCAGCTGC | CIITA | 499 |
| R5241 | GAAGCTTGTTGGAGACCTCT | CIITA | 500 |
| R5242 | GGAAGCTTGTTGGAGACCTC | CIITA | 501 |
| R5243 | TGGAAGCTTGTTGGAGACCT | CIITA | 502 |
| R5244 | TACCGCTCACTGCAGGACAC | CIITA | 503 |
| R5245 | CTGCTGCTCCTCTCCAGCCT | CIITA | 504 |
| R5246 | CCGCTCCAGGCTCTTGCTGC | CIITA | 505 |
| R5247 | TGCCCAGTCCGGGGTGGCCA | CIITA | 506 |
| R5248 | GGCCAGCTGCCGTTCTGCCC | CIITA | 507 |
| R5249 | GCAGCCAACAGCACCTCAGC | CIITA | 508 |
| R5250 | GCTGCCAAGGAGCACCGGCG | CIITA | 509 |
| R5251 | CCCAGCACAGCAATCACTCG | CIITA | 510 |
| R5252 | GCCCAGCACAGCAATCACTC | CIITA | 511 |
| R5253 | CTGTGCTGGGCAAAGCTGGT | CIITA | 512 |
| R5254 | CCCTGACCAGCTTTGCCCAG | CIITA | 513 |
| R5255 | GGCTGGGGCAGTGAGCCGGG | CIITA | 514 |
| R5256 | TGGCCGGCTTCCCCAGTACG | CIITA | 515 |
| R5257 | CCCAGTACGACTTTGTCTTC | CIITA | 516 |
| R5258 | GTCTTCTCTGTCCCCTGCCA | CIITA | 517 |
| R5259 | TCTTCTCTGTCCCCTGCCAT | CIITA | 518 |
| R5260 | TCTGTCCCCTGCCATTGCTT | CIITA | 519 |
| R5261 | AAGCAATGGCAGGGGACAGA | CIITA | 520 |
| R5262 | CTTGAACCGTCCGGGGGATG | CIITA | 521 |
| R5263 | AACCGTCCGGGGGATGCCTA | CIITA | 522 |
| R5264 | TCCCTGGGCCCACAGCCACT | CIITA | 523 |
| R5265 | AAGATGTGGCTGAAAACCTC | CIITA | 524 |
| R5266 | TCAGCCACATCTTGAAGAGA | CIITA | 525 |
| R5267 | CAGCCACATCTTGAAGAGAC | CIITA | 526 |
| R5268 | AGCCACATCTTGAAGAGACC | CIITA | 527 |
| R5269 | AAGAGACCTGACCGCGTTCT | CIITA | 528 |
| R5270 | TGCTCATCCTAGACGGCTTC | CIITA | 529 |
| R5271 | CAGCTCCTCGAAGCCGTCTA | CIITA | 530 |
| R5272 | CGCTTCCAGCTCCTCGAAGC | CIITA | 531 |
| R5273 | GAGGAGCTGGAAGCGCAAGA | CIITA | 532 |
| R5274 | CTGCACAGCACGTGCGGACC | CIITA | 533 |
| R5275 | TGGAAAAGGCCGGCCAGCAG | CIITA | 534 |
| R5276 | TTCTGGAAAAGGCCGGCCAG | CIITA | 535 |
| R5277 | TCCAGAAGAAGCTGCTCCGA | CIITA | 536 |
| R5278 | CCAGAAGAAGCTGCTCCGAG | CIITA | 537 |
| R5279 | CAGAAGAAGCTGCTCCGAGG | CIITA | 538 |
| R5280 | CACCCTCCTCCTCACAGCCC | CIITA | 539 |
| R5281 | CTCAGGCTCTGGACCAGGCG | CIITA | 540 |
| R5282 | GAGCTGTCCGGCTTCTCCAT | CIITA | 541 |
| R5283 | AGCTGTCCGGCTTCTCCATG | CIITA | 542 |
| R5284 | TCCATGGAGCAGGCCCAGGC | CIITA | 543 |
| R5285 | GAGAGCTCAGGGATGACAGA | CIITA | 544 |
| R5286 | AGAGCTCAGGGATGACAGAG | CIITA | 545 |
| R5287 | GTGCTCTGTCATCCCTGAGC | CIITA | 546 |
| R5288 | TTCTCAGTCACAGCCACAGC | CIITA | 547 |
| R5289 | TCAGTCACAGCCACAGCCCT | CIITA | 548 |
| R5290 | GTGCCGGGCAGTGTGCCAGC | CIITA | 549 |
| R5291 | TGCCGGGCAGTGTGCCAGCT | CIITA | 550 |
| R5292 | GCGTCCTCCCCAAGCTCCAG | CIITA | 551 |
| R5293 | GGGAGGACGCCAAGCTGCCC | CIITA | 552 |
| R5294 | GCCAGCTCTGCCAGGGCCCC | CIITA | 553 |
| R5295 | ATGTCTGCGGCCCAGCTCCC | CIITA | 554 |
| R5392 | GATGTCTGCGGCCCAGCTCC | CIITA | 555 |
| R5393 | CCATCCGCAGACGTGAGGAC | CIITA | 556 |
| R5394 | GCCATCGCCCAGGTCCTCAC | CIITA | 557 |
| R5395 | GGCCATCGCCCAGGTCCTCA | CIITA | 558 |
| R5396 | GACTAAGCCTTTGGCCATCG | CIITA | 559 |
| R5397 | GTCCAACACCCACCGCGGGC | CIITA | 560 |
| R5398 | CAGGAGGAAGCTGGGGAAGG | CIITA | 561 |
| R5399 | CCCAGCTTCCTCCTGCAATG | CIITA | 562 |
| R5400 | CTCCTGCAATGCTTCCTGGG | CIITA | 563 |
| R5401 | CTGGGGGCCCTGTGGCTGGC | CIITA | 564 |
| R5402 | GCCACTCAGAGCCAGCCACA | CIITA | 565 |
| R5403 | CGCCACTCAGAGCCAGCCAC | CIITA | 566 |
| R5404 | ATTTCGCCACTCAGAGCCAG | CIITA | 567 |
| R5405 | TCCTTGATTTCGCCACTCAG | CIITA | 568 |
| R5406 | GGGTCAATGCTAGGTACTGC | CIITA | 569 |
| R5407 | CTTGGGGTCAATGCTAGGTA | CIITA | 570 |
| R5408 | TTCCTTGGGGTCAATGCTAG | CIITA | 571 |
| R5409 | ACCCCAAGGAAGAAGAGGCC | CIITA | 572 |
| R5410 | TCATAGGGCCTCTTCTTCCT | CIITA | 573 |
| R5411 | CTGGCTGGGCTGATCTTCCA | CIITA | 574 |
| R5412 | TGGCTGGGCTGATCTTCCAG | CIITA | 575 |
| R5413 | CAGCCTCCCGCCCGCTGCCT | CIITA | 576 |
| R5414 | CTGTCCACCGAGGCAGCCGC | CIITA | 577 |
| R5415 | TGCTTCCTGTCCACCGAGGC | CIITA | 578 |
| R5416 | AGGTACCTCGCAAGCACCTT | CIITA | 579 |
| R5417 | CGAGGTACCTGAAGCGGCTG | CIITA | 580 |
| R5418 | CAGCCTCCTCGGCCTCGTGG | CIITA | 581 |
| R5419 | GGCAGCACGTGGTACAGGAG | CIITA | 582 |
| R5420 | GCAGCACGTGGTACAGGAGC | CIITA | 583 |
| R5421 | TCTGGGCACCCGCCTCACGC | CIITA | 584 |
| R5422 | CTGGGCACCCGCCTCACGCC | CIITA | 585 |
| R5423 | TGGGCACCCGCCTCACGCCT | CIITA | 586 |
| R5424 | CCCAGTACATGTGCATCAGG | CIITA | 587 |
| R5425 | GCCCGCCGCCTCCAAGGCCT | CIITA | 588 |
| R5426 | GAGGCGGCGGGCCAAGACTT | CIITA | 589 |
| R5427 | TCCCTGGACCTCCGCAGCAC | CIITA | 590 |
| R5428 | GCCCCTCTGGATTGGGGAGC | CIITA | 591 |
| R5429 | CCCCTCTGGATTGGGGAGCC | CIITA | 592 |
| R5430 | GGGAGCCTCGTGGGACTCAG | CIITA | 593 |
| R5431 | GTCTCCCCATGCTGCTGCAG | CIITA | 594 |
| R5432 | TCCTCTGCTGCCTGAAGTAG | CIITA | 595 |
| R5433 | AGGCAGCAGAGGAGAAGTTC | CIITA | 596 |
| R5434 | AAAGGCTCGATGGTGAACTT | CIITA | 597 |
| R5435 | GAAAGGCTCGATGGTGAACT | CIITA | 598 |
| R5436 | ACCATCGAGCCTTTCAAAGC | CIITA | 599 |
| R5437 | GCTTTGAAAGGCTCGATGGT | CIITA | 600 |
| R5438 | AGGGACTTGGCTTTGAAAGG | CIITA | 601 |
| R5439 | CAAAGCCAAGTCCCTGAAGG | CIITA | 602 |
| R5440 | AAAGCCAAGTCCCTGAAGGA | CIITA | 603 |
| R5441 | CACATCCTTCAGGGACTTGG | CIITA | 604 |
| R5442 | CCAGGTCTTCCACATCCTTC | CIITA | 605 |
| R5443 | CCCAGGTCTTCCACATCCTT | CIITA | 606 |
| R5444 | CTCGGAAGACACAGCTGGGG | CIITA | 607 |
| R5445 | GGTCCCGAACAGCAGGGAGC | CIITA | 608 |
| R5446 | AGGTCCCGAACAGCAGGGAG | CIITA | 609 |
| R5447 | TTTAGGTCCCGAACAGCAGG | CIITA | 610 |
| R5448 | CTTTAGGTCCCGAACAGCAG | CIITA | 611 |
| R5449 | GGGACCTAAAGAAACTGGAG | CIITA | 612 |
| R5450 | GGGAAAGCCTGGGGGCCTGA | CIITA | 613 |
| R5451 | GGGGAAAGCCTGGGGGCCTG | CIITA | 614 |
| R5452 | CCCCAAACTGGTGCGGATCC | CIITA | 615 |
| R5453 | CCCAAACTGGTGCGGATCCT | CIITA | 616 |
| R5454 | TTCTCACTCAGCGCATCCAG | CIITA | 617 |
| R5455 | AGCTGGGGGAAGGTGGCTGA | CIITA | 618 |
| R5456 | CCCCAGCTGAAGTCCTTGGA | CIITA | 619 |
| R5457 | CAAGGACTTCAGCTGGGGGA | CIITA | 620 |
| R5458 | CCAAGGACTTCAGCTGGGGG | CIITA | 621 |
| R5459 | AGGGTTTCCAAGGACTTCAG | CIITA | 622 |
| R5460 | TAGGCACCCAGGTCAGTGAT | CIITA | 623 |
| R5461 | GTAGGCACCCAGGTCAGTGA | CIITA | 624 |
| R5462 | GCTCGCTGCATCCCTGCTCA | CIITA | 625 |
| R5463 | GCCTGAGCAGGGATGCAGCG | CIITA | 626 |
| R5464 | TACAATAACTGCATCTGCGA | CIITA | 627 |
| R5465 | GCTCGTGTGCTTCCGGACAT | CIITA | 628 |
| R5466 | CGGACATGGTGTCCCTCCGG | CIITA | 629 |
| R5467 | ACGGCTGCCGGGGCCCAGCA | CIITA | 630 |
| R5468 | GGAGGTGTCCTCATGTGGAG | CIITA | 631 |
| R5469 | CTGGACACTGAATGGGATGG | CIITA | 632 |
| R5470 | AGTGTCCAGGAACACCTGCA | CIITA | 633 |
| R5471 | CAGGTGTTCCTGGACACTGA | CIITA | 634 |
| R5472 | TTGCAGGTGTTCCTGGACAC | CIITA | 635 |
| R5473 | ACGGATCAGCCTGAGATGAT | CIITA | 636 |

TABLE 7.1
Spacer sequences of gRNAs targeting human CIITA

| SEQ | |
|---|---|
| ID | |
| NO | Spacer Sequence |
| 1754 | UGCUUCUGAGCUGGGCAUCC |
| 1755 | AGCUGGGCAUCCGAAGGCAU |
| 1756 | CUUCUGAGCUGGGCAUCCGA |
| 1757 | GGAAUCCCAGCCAGGCAGCA |
| 1758 | UAGGAAUCCCAGCCAGGCAG |
| 1759 | GCAGCCCCUCCUCGUGCCCU |
| 1760 | ACAGGUAGGACCCAGCAGGG |
| 1761 | UGACCAGAUGGACCUGGCUG |
| 1762 | CCACUUCUAUGACCAGAUGG |
| 1763 | ACCAGAUGGACCUGGCUGGA |
| 1764 | CCACCAUGGAGUUGGGGCCC |
| 1765 | CCUCUACCACUUCUAUGACC |
| 1766 | GGGGCCCCAACUCCAUGGUG |
| 1767 | GUCAUAGAAGUGGUAGAGGC |
| 1768 | ACAUGGAAGGUGAUGAAGAG |
| 1769 | UGACAUGGAAGGUGAUGAAG |
| 1770 | UCUUCCAGGACUCCCAGCUG |
| 1771 | CUACACAAUGCGUUGCCUGG |
| 1772 | GGGCUCUGACAGGUAGGACC |
| 1773 | UGUAGGAAUCCCAGCCAGGC |
| 1774 | CCUGGCUCCACGCCCUGCUG |
| 1775 | GGGAAGCUGAGGGCACGAGG |
| 1776 | ACAGCGAUGCUGACCCCCUG |
| 1777 | UUAACAGCGAUGCUGACCCC |
| 1778 | UAUGACCAGAUGGACCUGGC |
| 1779 | GGGCCCCUAGAAGGUGGCUA |
| 1780 | UAGGGGCCCCAACUCCAUGG |
| 1781 | AGAAGCUCCAGGUAGCCACC |
| 1782 | UCCAGCCAGGUCCAUCUGGU |
| 1783 | UUCUCCAGCCAGGUCCAUCU |
| 1784 | AGCAGGCUGUUGUGUGACAU |
| 1785 | CAUGUCACACAACAGCCUGC |
| 1786 | UGUGACAUGGAAGGUGAUGA |
| 1787 | AUCACCUUCCAUGUCACACA |
| 1788 | GCAUAAGCCUCCCUGGUCUC |
| 1789 | CAGGACUCCCAGCUGGAGGG |
| 1790 | CUCAGGCCCUCCAGCUGGGA |
| 1791 | UGCUGGCAUCUCCAUACUCU |
| 1792 | UGCCCAACUUCUGCUGGCAU |
| 1793 | CUGCCCAACUUCUGCUGGCA |
| 1794 | UCUGCCCAACUUCUGCUGGC |
| 1795 | UGACUUUUCUGCCCAACUUC |
| 1796 | CUGACUUUUCUGCCCAACUU |
| 1797 | UCUGACUUUUCUGCCCAACU |
| 1798 | CCAGAGGAGCUUCCGGCAGA |
| 1799 | AGGUCUGCCGGAAGCUCCUC |
| 1800 | CGGCAGACCUGAAGCACUGG |
| 1801 | CAGUGCUUCAGGUCUGCCGG |
| 1802 | AACAGCGCAGGCAGUGGCAG |
| 1803 | AACCAGGAGCCAGCCUCCGG |
| 1804 | UCCAGGCGCAUCUGGCCGGA |
| 1805 | CUCCAGGCGCAUCUGGCCGG |
| 1806 | UCUCCAGGCGCAUCUGGCCG |
| 1807 | CUCCAGUUCCUCGUUGAGCU |
| 1808 | UCCAGUUCCUCGUUGAGCUG |
| 1809 | AGGCAGCUCAACGAGGAACU |
| 1810 | CUCGUUGAGCUGCCUGAAUC |
| 1811 | AGCUGCCUGAAUCUCCCUGA |
| 1812 | GUCCCCACCAUCUCCACUCU |
| 1813 | UCCCCACCAUCUCCACUCUG |
| 1814 | CCAGAGCCCAUGGGGCAGAG |
| 1815 | GCCAGAGCCCAUGGGGCAGA |
| 1816 | CAGCCUCAGAGAUUUGCCAG |
| 1817 | GGAGGCCGUGGACAGUGAAU |
| 1818 | ACUGUCCACGGCCUCCCAAC |
| 1819 | GCUCCAUCAGCCACUGACCU |
| 1820 | AGGCAUGCUGGGCAGGUCAG |
| 1821 | CUCGGGAGGUCAGGGCAGGU |
| 1822 | GCUCGGGAGGUCAGGGCAGG |
| 1823 | GAGACCUCUCCAGCUGCCGG |
| 1824 | UUGGAGACCUCUCCAGCUGC |
| 1825 | GAAGCUUGUUGGAGACCUCU |
| 1826 | GGAAGCUUGUUGGAGACCUC |
| 1827 | UGGAAGCUUGUUGGAGACCU |
| 1828 | UACCGCUCACUGCAGGACAC |
| 1829 | CUGCUGCUCCUCUCCAGCCU |
| 1830 | CCGCUCCAGGCUCUUGCUGC |
| 1831 | UGCCCAGUCCGGGGUGGCCA |
| 1832 | GGCCAGCUGCCGUUCUGCCC |
| 1833 | GCAGCCAACAGCACCUCAGC |
| 1834 | GCUGCCAAGGAGCACCGGCG |
| 1835 | CCCAGCACAGCAAUCACUCG |
| 1836 | GCCCAGCACAGCAAUCACUC |
| 1837 | CUGUGCUGGGCAAAGCUGGU |
| 1838 | CCCUGACCAGCUUUGCCCAG |
| 1839 | GGCUGGGGCAGUGAGCCGGG |
| 1840 | UGGCCGGCUUCCCCAGUACG |
| 1841 | CCCAGUACGACUUUGUCUUC |
| 1842 | GUCUUCUCUGUCCCCUGCCA |
| 1843 | UCUUCUCUGUCCCCUGCCAU |
| 1844 | UCUGUCCCCUGCCAUUGCUU |
| 1845 | AAGCAAUGGCAGGGGACAGA |
| 1846 | CUUGAACCGUCCGGGGGAUG |
| 1847 | AACCGUCCGGGGGAUGCCUA |
| 1848 | UCCCUGGGCCCACAGCCACU |
| 1849 | AAGAUGUGGCUGAAAACCUC |
| 1850 | UCAGCCACAUCUUGAAGAGA |
| 1851 | CAGCCACAUCUUGAAGAGAC |
| 1852 | AGCCACAUCUUGAAGAGACC |
| 1853 | AAGAGACCUGACCGCGUUCU |
| 1854 | UGCUCAUCCUAGACGGCUUC |
| 1855 | CAGCUCCUCGAAGCCGUCUA |
| 1856 | CGCUUCCAGCUCCUCGAAGC |
| 1857 | GAGGAGCUGGAAGCGCAAGA |
| 1858 | CUGCACAGCACGUGCGGACC |
| 1859 | UGGAAAAGGCCGGCCAGCAG |
| 1860 | UUCUGGAAAAGGCCGGCCAG |
| 1861 | UCCAGAAGAAGCUGCUCCGA |
| 1862 | CCAGAAGAAGCUGCUCCGAG |
| 1863 | CAGAAGAAGCUGCUCCGAGG |
| 1864 | CACCCUCCUCCUCACAGCCC |
| 1865 | CUCAGGCUCUGGACCAGGCG |
| 1866 | GAGCUGUCCGGCUUCUCCAU |
| 1867 | AGCUGUCCGGCUUCUCCAUG |
| 1868 | UCCAUGGAGCAGGCCCAGGC |
| 1869 | GAGAGCUCAGGGAUGACAGA |
| 1870 | AGAGCUCAGGGAUGACAGAG |
| 1871 | GUGCUCUGUCAUCCCUGAGC |
| 1872 | UUCUCAGUCACAGCCACAGC |
| 1873 | UCAGUCACAGCCACAGCCCU |
| 1874 | GUGCCGGGCAGUGUGCCAGC |
| 1875 | UGCCGGGCAGUGUGCCAGCU |
| 1876 | GCGUCCUCCCCAAGCUCCAG |
| 1877 | GGGAGGACGCCAAGCUGCCC |
| 1878 | GCCAGCUCUGCCAGGGCCCC |
| 1879 | AUGUCUGCGGCCCAGCUCCC |
| 1880 | GAUGUCUGCGGCCCAGCUCC |
| 1881 | CCAUCCGCAGACGUGAGGAC |
| 1882 | GCCAUCGCCCAGGUCCUCAC |
| 1883 | GGCCAUCGCCCAGGUCCUCA |
| 1884 | GACUAAGCCUUUGGCCAUCG |
| 1885 | GUCCAACACCCACCGCGGGC |
| 1886 | CAGGAGGAAGCUGGGGAAGG |
| 1887 | CCCAGCUUCCUCCUGCAAUG |
| 1888 | CUCCUGCAAUGCUUCCUGGG |
| 1889 | CUGGGGGCCCUGUGGCUGGC |
| 1890 | GCCACUCAGAGCCAGCCACA |
| 1891 | CGCCACUCAGAGCCAGCCAC |
| 1892 | AUUUCGCCACUCAGAGCCAG |
| 1893 | UCCUUGAUUUCGCCACUCAG |
| 1894 | GGGUCAAUGCUAGGUACUGC |
| 1895 | CUUGGGGUCAAUGCUAGGUA |
| 1896 | UUCCUUGGGGUCAAUGCUAG |
| 1897 | ACCCCAAGGAAGAAGAGGCC |
| 1898 | UCAUAGGGCCUCUUCUUCCU |
| 1899 | CUGGCUGGGCUGAUCUUCCA |
| 1900 | UGGCUGGGCUGAUCUUCCAG |
| 1901 | CAGCCUCCCGCCCGCUGCCU |
| 1902 | CUGUCCACCGAGGCAGCCGC |
| 1903 | UGCUUCCUGUCCACCGAGGC |
| 1904 | AGGUACCUCGCAAGCACCUU |
| 1905 | CGAGGUACCUGAAGCGGCUG |
| 1906 | CAGCCUCCUCGGCCUCGUGG |
| 1907 | GGCAGCACGUGGUACAGGAG |
| 1908 | GCAGCACGUGGUACAGGAGC |
| 1909 | UCUGGGCACCCGCCUCACGC |
| 1910 | CUGGGCACCCGCCUCACGCC |
| 1911 | UGGGCACCCGCCUCACGCCU |
| 1912 | CCCAGUACAUGUGCAUCAGG |
| 1913 | GCCCGCCGCCUCCAAGGCCU |
| 1914 | GAGGCGGCGGGCCAAGACUU |
| 1915 | UCCCUGGACCUCCGCAGCAC |
| 1916 | GCCCCUCUGGAUUGGGGAGC |
| 1917 | CCCCUCUGGAUUGGGGAGCC |
| 1918 | GGGAGCCUCGUGGGACUCAG |
| 1919 | GUCUCCCCAUGCUGCUGCAG |
| 1920 | UCCUCUGCUGCCUGAAGUAG |
| 1921 | AGGCAGCAGAGGAGAAGUUC |
| 1922 | AAAGGCUCGAUGGUGAACUU |
| 1923 | GAAAGGCUCGAUGGUGAACU |
| 1924 | ACCAUCGAGCCUUUCAAAGC |
| 1925 | GCUUUGAAAGGCUCGAUGGU |
| 1926 | AGGGACUUGGCUUUGAAAGG |
| 1927 | CAAAGCCAAGUCCCUGAAGG |
| 1928 | AAAGCCAAGUCCCUGAAGGA |
| 1929 | CACAUCCUUCAGGGACUUGG |
| 1930 | CCAGGUCUUCCACAUCCUUC |
| 1931 | CCCAGGUCUUCCACAUCCUU |
| 1932 | CUCGGAAGACACAGCUGGGG |
| 1933 | GGUCCCGAACAGCAGGGAGC |
| 1934 | AGGUCCCGAACAGCAGGGAG |
| 1935 | UUUAGGUCCCGAACAGCAGG |
| 1936 | CUUUAGGUCCCGAACAGCAG |
| 1937 | GGGACCUAAAGAAACUGGAG |
| 1938 | GGGAAAGCCUGGGGGCCUGA |
| 1939 | GGGGAAAGCCUGGGGGCCUG |
| 1940 | CCCCAAACUGGUGCGGAUCC |
| 1941 | CCCAAACUGGUGCGGAUCCU |
| 1942 | UUCUCACUCAGCGCAUCCAG |
| 1943 | AGCUGGGGGAAGGUGGCUGA |
| 1944 | CCCCAGCUGAAGUCCUUGGA |
| 1945 | CAAGGACUUCAGCUGGGGGA |
| 1946 | CCAAGGACUUCAGCUGGGGG |
| 1947 | AGGGUUUCCAAGGACUUCAG |
| 1948 | UAGGCACCCAGGUCAGUGAU |
| 1949 | GUAGGCACCCAGGUCAGUGA |
| 1950 | GCUCGCUGCAUCCCUGCUCA |
| 1951 | GCCUGAGCAGGGAUGCAGCG |
| 1952 | UACAAUAACUGCAUCUGCGA |
| 1953 | GCUCGUGUGCUUCCGGACAU |
| 1954 | CGGACAUGGUGUCCCUCCGG |
| 1955 | ACGGCUGCCGGGGCCCAGCA |
| 1956 | GGAGGUGUCCUCAUGUGGAG |
| 1957 | CUGGACACUGAAUGGGAUGG |
| 1958 | AGUGUCCAGGAACACCUGCA |
| 1959 | CAGGUGUUCCUGGACACUGA |
| 1960 | UUGCAGGUGUUCCUGGACAC |
| 1961 | ACGGAUCAGCCUGAGAUGAU |

[0365] TABLE 8, TABLE 9, TABLE 9.1, TABLE 10, TABLE 10.1, TABLE 11, TABLE 11.1, TABLE 12, TABLE 12.1, TABLE 13, TABLE 14, TABLE 14.1, TABLE 15, TABLE 15.1 and TABLE 16 provide illustrative guide sequences that are useful in the compositions, systems and methods described herein.

TABLE 8
CasΦ.12 gRNAs targeting human CIITA

| | Repeat + spacer sequence RNA | |
|---|---|---|
| Name | Sequence (5′ --> 3′) | SEQ ID NO |
| R4503_CasPhi12_ | CUUUCAAGACUAAUAGAUUGCUCCUUACG | 637 |
| C2TA_T1.1 | AGGAGACCUACACAAUGCGUUGCCUGG | |
| R4504_CasPhi12_ | CUUUCAAGACUAAUAGAUUGCUCCUUACG | 638 |
| C2TA_T1.2 | AGGAGACGGGCUCUGACAGGUAGGACC | |
| R4505_CasPhi12_ | CUUUCAAGACUAAUAGAUUGCUCCUUACG | 639 |
| C2TA_T1.3 | AGGAGACUGUAGGAAUCCCAGCCAGGC | |
| R4506_CasPhi12_ | CUUUCAAGACUAAUAGAUUGCUCCUUACG | 640 |
| C2TA_T1.8 | AGGAGACCCUGGCUCCACGCCCUGCUG | |
| R4507_CasPhi12_ | CUUUCAAGACUAAUAGAUUGCUCCUUACG | 641 |
| C2TA_T1.9 | AGGAGACGGGAAGCUGAGGGCACGAGG | |
| R4508_CasPhi12_ | CUUUCAAGACUAAUAGAUUGCUCCUUACG | 642 |
| C2TA_T2.1 | AGGAGACACAGCGAUGCUGACCCCCUG | |
| R4509_CasPhi12_ | CUUUCAAGACUAAUAGAUUGCUCCUUACG | 643 |
| C2TA_T2.2 | AGGAGACUUAACAGCGAUGCUGACCCC | |
| R4510_CasPhi12_ | CUUUCAAGACUAAUAGAUUGCUCCUUACG | 644 |
| C2TA_T2.3 | AGGAGACUAUGACCAGAUGGACCUGGC | |
| R4511_CasPhi12_ | CUUUCAAGACUAAUAGAUUGCUCCUUACG | 645 |
| C2TA_T2.4 | AGGAGACGGGCCCCUAGAAGGUGGCUA | |
| R4512_CasPhi12_ | CUUUCAAGACUAAUAGAUUGCUCCUUACG | 646 |
| C2TA_T2.5 | AGGAGACUAGGGGCCCCAACUCCAUGG | |
| R4513_CasPhi12_ | CUUUCAAGACUAAUAGAUUGCUCCUUACG | 647 |
| C2TA_T2.6 | AGGAGACAGAAGCUCCAGGUAGCCACC | |
| R4514_CasPhi12_ | CUUUCAAGACUAAUAGAUUGCUCCUUACG | 648 |
| C2TA_T2.7 | AGGAGACUCCAGCCAGGUCCAUCUGGU | |
| R4515_CasPhi12_ | CUUUCAAGACUAAUAGAUUGCUCCUUACG | 649 |
| C2TA_T2.8 | AGGAGACUUCUCCAGCCAGGUCCAUCU | |
| R5200_CasPhi12 | CUUUCAAGACUAAUAGAUUGCUCCUUACG | 650 |
| | AGGAGACAGCAGGCUGUUGUGUGACAU | |
| R5201_CasPhi12 | CUUUCAAGACUAAUAGAUUGCUCCUUACG | 651 |
| | AGGAGACCAUGUCACACAACAGCCUGC | |
| R5202_CasPhi12 | CUUUCAAGACUAAUAGAUUGCUCCUUACG | 652 |
| | AGGAGACUGUGACAUGGAAGGUGAUGA | |
| R5203_CasPhi12 | CUUUCAAGACUAAUAGAUUGCUCCUUACG | 653 |
| | AGGAGACAUCACCUUCCAUGUCACACA | |
| R5204_CasPhi12 | CUUUCAAGACUAAUAGAUUGCUCCUUACG | 654 |
| | AGGAGACGCAUAAGCCUCCCUGGUCUC | |
| R5205_CasPhi12 | CUUUCAAGACUAAUAGAUUGCUCCUUACG | 655 |
| | AGGAGACCAGGACUCCCAGCUGGAGGG | |
| R5206_CasPhi12 | CUUUCAAGACUAAUAGAUUGCUCCUUACG | 656 |
| | AGGAGACCUCAGGCCCUCCAGCUGGGA | |
| R5207_CasPhi12 | CUUUCAAGACUAAUAGAUUGCUCCUUACG | 657 |
| | AGGAGACUGCUGGCAUCUCCAUACUCU | |
| R5208_CasPhi12 | CUUUCAAGACUAAUAGAUUGCUCCUUACG | 658 |
| | AGGAGACUGCCCAACUUCUGCUGGCAU | |
| R5209_CasPhi12 | CUUUCAAGACUAAUAGAUUGCUCCUUACG | 659 |
| | AGGAGACCUGCCCAACUUCUGCUGGCA | |
| R5210_CasPhi12 | CUUUCAAGACUAAUAGAUUGCUCCUUACG | 660 |
| | AGGAGACUCUGCCCAACUUCUGCUGGC | |
| R5211_CasPhi12 | CUUUCAAGACUAAUAGAUUGCUCCUUACG | 661 |
| | AGGAGACUGACUUUUCUGCCCAACUUC | |
| R5212_CasPhi12 | CUUUCAAGACUAAUAGAUUGCUCCUUACG | 662 |
| | AGGAGACCUGACUUUUCUGCCCAACUU | |
| R5213_CasPhi12 | CUUUCAAGACUAAUAGAUUGCUCCUUACG | 663 |
| | AGGAGACUCUGACUUUUCUGCCCAACU | |
| R5214_CasPhi12 | CUUUCAAGACUAAUAGAUUGCUCCUUACG | 664 |
| | AGGAGACCCAGAGGAGCUUCCGGCAGA | |
| R5215_CasPhi12 | CUUUCAAGACUAAUAGAUUGCUCCUUACG | 665 |
| | AGGAGACAGGUCUGCCGGAAGCUCCUC | |
| R5216_CasPhi12 | CUUUCAAGACUAAUAGAUUGCUCCUUACG | 666 |
| | AGGAGACCGGCAGACCUGAAGCACUGG | |
| R5217_CasPhi12 | CUUUCAAGACUAAUAGAUUGCUCCUUACG | 667 |
| | AGGAGACCAGUGCUUCAGGUCUGCCGG | |
| R5218_CasPhi12 | CUUUCAAGACUAAUAGAUUGCUCCUUACG | 668 |
| | AGGAGACAACAGCGCAGGCAGUGGCAG | |
| R5219_CasPhi12 | CUUUCAAGACUAAUAGAUUGCUCCUUACG | 669 |
| | AGGAGACAACCAGGAGCCAGCCUCCGG | |
| R5220_CasPhi12 | CUUUCAAGACUAAUAGAUUGCUCCUUACG | 670 |
| | AGGAGACUCCAGGCGCAUCUGGCCGGA | |
| R5221_CasPhi12 | CUUUCAAGACUAAUAGAUUGCUCCUUACG | 671 |
| | AGGAGACCUCCAGGCGCAUCUGGCCGG | |
| R5222_CasPhi12 | CUUUCAAGACUAAUAGAUUGCUCCUUACG | 672 |
| | AGGAGACUCUCCAGGCGCAUCUGGCCG | |
| R5223_CasPhi12 | CUUUCAAGACUAAUAGAUUGCUCCUUACG | 673 |
| | AGGAGACCUCCAGUUCCUCGUUGAGCU | |
| R5224_CasPhi12 | CUUUCAAGACUAAUAGAUUGCUCCUUACG | 674 |
| | AGGAGACUCCAGUUCCUCGUUGAGCUG | |
| R5225_CasPhi12 | CUUUCAAGACUAAUAGAUUGCUCCUUACG | 675 |
| | AGGAGACAGGCAGCUCAACGAGGAACU | |
| R5226_CasPhi12 | CUUUCAAGACUAAUAGAUUGCUCCUUACG | 676 |
| | AGGAGACCUCGUUGAGCUGCCUGAAUC | |
| R5227_CasPhi12 | CUUUCAAGACUAAUAGAUUGCUCCUUACG | 677 |
| | AGGAGACAGCUGCCUGAAUCUCCCUGA | |
| R5228_CasPhi12 | CUUUCAAGACUAAUAGAUUGCUCCUUACG | 678 |
| | AGGAGACGUCCCCACCAUCUCCACUCU | |
| R5229_CasPhi12 | CUUUCAAGACUAAUAGAUUGCUCCUUACG | 679 |
| | AGGAGACUCCCCACCAUCUCCACUCUG | |
| R5230_CasPhi12 | CUUUCAAGACUAAUAGAUUGCUCCUUACG | 680 |
| | AGGAGACCCAGAGCCCAUGGGGCAGAG | |
| R5231_CasPhi12 | CUUUCAAGACUAAUAGAUUGCUCCUUACG | 681 |
| | AGGAGACGCCAGAGCCCAUGGGGCAGA | |
| R5232_CasPhi12 | CUUUCAAGACUAAUAGAUUGCUCCUUACG | 682 |
| | AGGAGACCAGCCUCAGAGAUUUGCCAG | |
| R5233_CasPhi12 | CUUUCAAGACUAAUAGAUUGCUCCUUACG | 683 |
| | AGGAGACGGAGGCCGUGGACAGUGAAU | |
| R5234_CasPhi12 | CUUUCAAGACUAAUAGAUUGCUCCUUACG | 684 |
| | AGGAGACACUGUCCACGGCCUCCCAAC | |
| R5235_CasPhi12 | CUUUCAAGACUAAUAGAUUGCUCCUUACG | 685 |
| | AGGAGACGCUCCAUCAGCCACUGACCU | |
| R5236_CasPhi12 | CUUUCAAGACUAAUAGAUUGCUCCUUACG | 686 |
| | AGGAGACAGGCAUGCUGGGCAGGUCAG | |
| R5237_CasPhi12 | CUUUCAAGACUAAUAGAUUGCUCCUUACG | 687 |
| | AGGAGACCUCGGGAGGUCAGGGCAGGU | |
| R5238_CasPhi12 | CUUUCAAGACUAAUAGAUUGCUCCUUACG | 688 |
| | AGGAGACGCUCGGGAGGUCAGGGCAGG | |
| R5239_CasPhi12 | CUUUCAAGACUAAUAGAUUGCUCCUUACG | 689 |
| | AGGAGACGAGACCUCUCCAGCUGCCGG | |
| R5240_CasPhi12 | CUUUCAAGACUAAUAGAUUGCUCCUUACG | 690 |
| | AGGAGACUUGGAGACCUCUCCAGCUGC | |
| R5241_CasPhi12 | CUUUCAAGACUAAUAGAUUGCUCCUUACG | 691 |
| | AGGAGACGAAGCUUGUUGGAGACCUCU | |
| R5242_CasPhi12 | CUUUCAAGACUAAUAGAUUGCUCCUUACG | 692 |
| | AGGAGACGGAAGCUUGUUGGAGACCUC | |
| R5243_CasPhi12 | CUUUCAAGACUAAUAGAUUGCUCCUUACG | 693 |
| | AGGAGACUGGAAGCUUGUUGGAGACCU | |
| R5244_CasPhi12 | CUUUCAAGACUAAUAGAUUGCUCCUUACG | 694 |
| | AGGAGACUACCGCUCACUGCAGGACAC | |
| R5245_CasPhi12 | CUUUCAAGACUAAUAGAUUGCUCCUUACG | 695 |
| | AGGAGACCUGCUGCUCCUCUCCAGCCU | |
| R5246_CasPhi12 | CUUUCAAGACUAAUAGAUUGCUCCUUACG | 696 |
| | AGGAGACCCGCUCCAGGCUCUUGCUGC | |
| R5247_CasPhi12 | CUUUCAAGACUAAUAGAUUGCUCCUUACG | 697 |
| | AGGAGACUGCCCAGUCCGGGGUGGCCA | |
| R5248_CasPhi12 | CUUUCAAGACUAAUAGAUUGCUCCUUACG | 698 |
| | AGGAGACGGCCAGCUGCCGUUCUGCCC | |
| R5249_CasPhi12 | CUUUCAAGACUAAUAGAUUGCUCCUUACG | 699 |
| | AGGAGACGCAGCCAACAGCACCUCAGC | |
| R5250_CasPhi12 | CUUUCAAGACUAAUAGAUUGCUCCUUACG | 700 |
| | AGGAGACGCUGCCAAGGAGCACCGGCG | |
| R5251_CasPhi12 | CUUUCAAGACUAAUAGAUUGCUCCUUACG | 701 |
| | AGGAGACCCCAGCACAGCAAUCACUCG | |
| R5252_CasPhi12 | CUUUCAAGACUAAUAGAUUGCUCCUUACG | 702 |
| | AGGAGACGCCCAGCACAGCAAUCACUC | |
| R5253_CasPhi12 | CUUUCAAGACUAAUAGAUUGCUCCUUACG | 703 |
| | AGGAGACCUGUGCUGGGCAAAGCUGGU | |
| R5254_CasPhi12 | CUUUCAAGACUAAUAGAUUGCUCCUUACG | 704 |
| | AGGAGACCCCUGACCAGCUUUGCCCAG | |
| R5255_CasPhi12 | CUUUCAAGACUAAUAGAUUGCUCCUUACG | 705 |
| | AGGAGACGGCUGGGGCAGUGAGCCGGG | |
| R5256_CasPhi12 | CUUUCAAGACUAAUAGAUUGCUCCUUACG | 706 |
| | AGGAGACUGGCCGGCUUCCCCAGUACG | |
| R5257_CasPhi12 | CUUUCAAGACUAAUAGAUUGCUCCUUACG | 707 |
| | AGGAGACCCCAGUACGACUUUGUCUUC | |
| R5258_CasPhi12 | CUUUCAAGACUAAUAGAUUGCUCCUUACG | 708 |
| | AGGAGACGUCUUCUCUGUCCCCUGCCA | |
| R5259_CasPhi12 | CUUUCAAGACUAAUAGAUUGCUCCUUACG | 709 |
| | AGGAGACUCUUCUCUGUCCCCUGCCAU | |
| R5260_CasPhi12 | CUUUCAAGACUAAUAGAUUGCUCCUUACG | 710 |
| | AGGAGACUCUGUCCCCUGCCAUUGCUU | |
| R5261_CasPhi12 | CUUUCAAGACUAAUAGAUUGCUCCUUACG | 711 |
| | AGGAGACAAGCAAUGGCAGGGGACAGA | |
| R5262_CasPhi12 | CUUUCAAGACUAAUAGAUUGCUCCUUACG | 712 |
| | AGGAGACCUUGAACCGUCCGGGGGAUG | |
| R5263_CasPhi12 | CUUUCAAGACUAAUAGAUUGCUCCUUACG | 713 |
| | AGGAGACAACCGUCCGGGGGAUGCCUA | |
| R5264_CasPhi12 | CUUUCAAGACUAAUAGAUUGCUCCUUACG | 714 |
| | AGGAGACUCCCUGGGCCCACAGCCACU | |
| R5265_CasPhi12 | CUUUCAAGACUAAUAGAUUGCUCCUUACG | 715 |
| | AGGAGACAAGAUGUGGCUGAAAACCUC | |
| R5266_CasPhi12 | CUUUCAAGACUAAUAGAUUGCUCCUUACG | 716 |
| | AGGAGACUCAGCCACAUCUUGAAGAGA | |
| R5267_CasPhi12 | CUUUCAAGACUAAUAGAUUGCUCCUUACG | 717 |
| | AGGAGACCAGCCACAUCUUGAAGAGAC | |
| R5268_CasPhi12 | CUUUCAAGACUAAUAGAUUGCUCCUUACG | 718 |
| | AGGAGACAGCCACAUCUUGAAGAGACC | |
| R5269_CasPhi12 | CUUUCAAGACUAAUAGAUUGCUCCUUACG | 719 |
| | AGGAGACAAGAGACCUGACCGCGUUCU | |
| R5270_CasPhi12 | CUUUCAAGACUAAUAGAUUGCUCCUUACG | 720 |
| | AGGAGACUGCUCAUCCUAGACGGCUUC | |
| R5271_CasPhi12 | CUUUCAAGACUAAUAGAUUGCUCCUUACG | 721 |
| | AGGAGACCAGCUCCUCGAAGCCGUCUA | |
| R5272_CasPhi12 | CUUUCAAGACUAAUAGAUUGCUCCUUACG | 722 |
| | AGGAGACCGCUUCCAGCUCCUCGAAGC | |
| R5273_CasPhi12 | CUUUCAAGACUAAUAGAUUGCUCCUUACG | 723 |
| | AGGAGACGAGGAGCUGGAAGCGCAAGA | |
| R5274_CasPhi12 | CUUUCAAGACUAAUAGAUUGCUCCUUACG | 724 |
| | AGGAGACCUGCACAGCACGUGCGGACC | |
| R5275_CasPhi12 | CUUUCAAGACUAAUAGAUUGCUCCUUACG | 725 |
| | AGGAGACUGGAAAAGGCCGGCCAGCAG | |
| R5276_CasPhi12 | CUUUCAAGACUAAUAGAUUGCUCCUUACG | 726 |
| | AGGAGACUUCUGGAAAAGGCCGGCCAG | |
| R5277_CasPhi12 | CUUUCAAGACUAAUAGAUUGCUCCUUACG | 727 |
| | AGGAGACUCCAGAAGAAGCUGCUCCGA | |
| R5278_CasPhi12 | CUUUCAAGACUAAUAGAUUGCUCCUUACG | 728 |
| | AGGAGACCCAGAAGAAGCUGCUCCGAG | |
| R5279_CasPhi12 | CUUUCAAGACUAAUAGAUUGCUCCUUACG | 729 |
| | AGGAGACCAGAAGAAGCUGCUCCGAGG | |
| R5280_CasPhi12 | CUUUCAAGACUAAUAGAUUGCUCCUUACG | 730 |
| | AGGAGACCACCCUCCUCCUCACAGCCC | |
| R5281_CasPhi12 | CUUUCAAGACUAAUAGAUUGCUCCUUACG | 731 |
| | AGGAGACCUCAGGCUCUGGACCAGGCG | |
| R5282_CasPhi12 | CUUUCAAGACUAAUAGAUUGCUCCUUACG | 732 |
| | AGGAGACGAGCUGUCCGGCUUCUCCAU | |
| R5283_CasPhi12 | CUUUCAAGACUAAUAGAUUGCUCCUUACG | 733 |
| | AGGAGACAGCUGUCCGGCUUCUCCAUG | |
| R5284_CasPhi12 | CUUUCAAGACUAAUAGAUUGCUCCUUACG | 734 |
| | AGGAGACUCCAUGGAGCAGGCCCAGGC | |
| R5285_CasPhi12 | CUUUCAAGACUAAUAGAUUGCUCCUUACG | 735 |
| | AGGAGACGAGAGCUCAGGGAUGACAGA | |
| R5286_CasPhi12 | CUUUCAAGACUAAUAGAUUGCUCCUUACG | 736 |
| | AGGAGACAGAGCUCAGGGAUGACAGAG | |
| R5287_CasPhi12 | CUUUCAAGACUAAUAGAUUGCUCCUUACG | 737 |
| | AGGAGACGUGCUCUGUCAUCCCUGAGC | |
| R5288_CasPhi12 | CUUUCAAGACUAAUAGAUUGCUCCUUACG | 738 |
| | AGGAGACUUCUCAGUCACAGCCACAGC | |
| R5289_CasPhi12 | CUUUCAAGACUAAUAGAUUGCUCCUUACG | 739 |
| | AGGAGACUCAGUCACAGCCACAGCCCU | |
| R5290_CasPhi12 | CUUUCAAGACUAAUAGAUUGCUCCUUACG | 740 |
| | AGGAGACGUGCCGGGCAGUGUGCCAGC | |
| R5291_CasPhi12 | CUUUCAAGACUAAUAGAUUGCUCCUUACG | 741 |
| | AGGAGACUGCCGGGCAGUGUGCCAGCU | |
| R5292_CasPhi12 | CUUUCAAGACUAAUAGAUUGCUCCUUACG | 742 |
| | AGGAGACGCGUCCUCCCCAAGCUCCAG | |
| R5293_CasPhi12 | CUUUCAAGACUAAUAGAUUGCUCCUUACG | 743 |
| | AGGAGACGGGAGGACGCCAAGCUGCCC | |
| R5294_CasPhi12 | CUUUCAAGACUAAUAGAUUGCUCCUUACG | 744 |
| | AGGAGACGCCAGCUCUGCCAGGGCCCC | |
| R5295_CasPhi12 | CUUUCAAGACUAAUAGAUUGCUCCUUACG | 745 |
| | AGGAGACAUGUCUGCGGCCCAGCUCCC | |
| R5392_CasPhi12 | CUUUCAAGACUAAUAGAUUGCUCCUUACG | 746 |
| | AGGAGACGAUGUCUGCGGCCCAGCUCC | |
| R5393_CasPhi12 | CUUUCAAGACUAAUAGAUUGCUCCUUACG | 747 |
| | AGGAGACCCAUCCGCAGACGUGAGGAC | |
| R5394_CasPhi12 | CUUUCAAGACUAAUAGAUUGCUCCUUACG | 748 |
| | AGGAGACGCCAUCGCCCAGGUCCUCAC | |
| R5395_CasPhi12 | CUUUCAAGACUAAUAGAUUGCUCCUUACG | 749 |
| | AGGAGACGGCCAUCGCCCAGGUCCUCA | |
| R5396_CasPhi12 | CUUUCAAGACUAAUAGAUUGCUCCUUACG | 750 |
| | AGGAGACGACUAAGCCUUUGGCCAUCG | |
| R5397_CasPhi12 | CUUUCAAGACUAAUAGAUUGCUCCUUACG | 751 |
| | AGGAGACGUCCAACACCCACCGCGGGC | |
| R5398_CasPhi12 | CUUUCAAGACUAAUAGAUUGCUCCUUACG | 752 |
| | AGGAGACCAGGAGGAAGCUGGGGAAGG | |
| R5399_CasPhi12 | CUUUCAAGACUAAUAGAUUGCUCCUUACG | 753 |
| | AGGAGACCCCAGCUUCCUCCUGCAAUG | |
| R5400_CasPhi12 | CUUUCAAGACUAAUAGAUUGCUCCUUACG | 754 |
| | AGGAGACCUCCUGCAAUGCUUCCUGGG | |
| R5401_CasPhi12 | CUUUCAAGACUAAUAGAUUGCUCCUUACG | 755 |
| | AGGAGACCUGGGGGCCCUGUGGCUGGC | |
| R5402_CasPhi12 | CUUUCAAGACUAAUAGAUUGCUCCUUACG | 756 |
| | AGGAGACGCCACUCAGAGCCAGCCACA | |
| R5403_CasPhi12 | CUUUCAAGACUAAUAGAUUGCUCCUUACG | 757 |
| | AGGAGACCGCCACUCAGAGCCAGCCAC | |
| R5404_CasPhi12 | CUUUCAAGACUAAUAGAUUGCUCCUUACG | 758 |
| | AGGAGACAUUUCGCCACUCAGAGCCAG | |
| R5405_CasPhi12 | CUUUCAAGACUAAUAGAUUGCUCCUUACG | 759 |
| | AGGAGACUCCUUGAUUUCGCCACUCAG | |
| R5406_CasPhi12 | CUUUCAAGACUAAUAGAUUGCUCCUUACG | 760 |
| | AGGAGACGGGUCAAUGCUAGGUACUGC | |
| R5407_CasPhi12 | CUUUCAAGACUAAUAGAUUGCUCCUUACG | 761 |
| | AGGAGACCUUGGGGUCAAUGCUAGGUA | |
| R5408_CasPhi12 | CUUUCAAGACUAAUAGAUUGCUCCUUACG | 762 |
| | AGGAGACUUCCUUGGGGUCAAUGCUAG | |
| R5409_CasPhi12 | CUUUCAAGACUAAUAGAUUGCUCCUUACG | 763 |
| | AGGAGACACCCCAAGGAAGAAGAGGCC | |
| R5410_CasPhi12 | CUUUCAAGACUAAUAGAUUGCUCCUUACG | 764 |
| | AGGAGACUCAUAGGGCCUCUUCUUCCU | |
| R5411_CasPhi12 | CUUUCAAGACUAAUAGAUUGCUCCUUACG | 765 |
| | AGGAGACCUGGCUGGGCUGAUCUUCCA | |
| R5412_CasPhi12 | CUUUCAAGACUAAUAGAUUGCUCCUUACG | 766 |
| | AGGAGACUGGCUGGGCUGAUCUUCCAG | |
| R5413_CasPhi12 | CUUUCAAGACUAAUAGAUUGCUCCUUACG | 767 |
| | AGGAGACCAGCCUCCCGCCCGCUGCCU | |
| R5414_CasPhi12 | CUUUCAAGACUAAUAGAUUGCUCCUUACG | 768 |
| | AGGAGACCUGUCCACCGAGGCAGCCGC | |
| R5415_CasPhi12 | CUUUCAAGACUAAUAGAUUGCUCCUUACG | 769 |
| | AGGAGACUGCUUCCUGUCCACCGAGGC | |
| R5416_CasPhi12 | CUUUCAAGACUAAUAGAUUGCUCCUUACG | 770 |
| | AGGAGACAGGUACCUCGCAAGCACCUU | |
| R5417_CasPhi12 | CUUUCAAGACUAAUAGAUUGCUCCUUACG | 771 |
| | AGGAGACCGAGGUACCUGAAGCGGCUG | |
| R5418_CasPhi12 | CUUUCAAGACUAAUAGAUUGCUCCUUACG | 772 |
| | AGGAGACCAGCCUCCUCGGCCUCGUGG | |
| R5419_CasPhi12 | CUUUCAAGACUAAUAGAUUGCUCCUUACG | 773 |
| | AGGAGACGGCAGCACGUGGUACAGGAG | |
| R5420_CasPhi12 | CUUUCAAGACUAAUAGAUUGCUCCUUACG | 774 |
| | AGGAGACGCAGCACGUGGUACAGGAGC | |
| R5421_CasPhi12 | CUUUCAAGACUAAUAGAUUGCUCCUUACG | 775 |
| | AGGAGACUCUGGGCACCCGCCUCACGC | |
| R5422_CasPhi12 | CUUUCAAGACUAAUAGAUUGCUCCUUACG | 776 |
| | AGGAGACCUGGGCACCCGCCUCACGCC | |
| R5423_CasPhi12 | CUUUCAAGACUAAUAGAUUGCUCCUUACG | 777 |
| | AGGAGACUGGGCACCCGCCUCACGCCU | |
| R5424_CasPhi12 | CUUUCAAGACUAAUAGAUUGCUCCUUACG | 778 |
| | AGGAGACCCCAGUACAUGUGCAUCAGG | |
| R5425_CasPhi12 | CUUUCAAGACUAAUAGAUUGCUCCUUACG | 779 |
| | AGGAGACGCCCGCCGCCUCCAAGGCCU | |
| R5426_CasPhi12 | CUUUCAAGACUAAUAGAUUGCUCCUUACG | 780 |
| | AGGAGACGAGGCGGCGGGCCAAGACUU | |
| R5427_CasPhi12 | CUUUCAAGACUAAUAGAUUGCUCCUUACG | 781 |
| | AGGAGACUCCCUGGACCUCCGCAGCAC | |
| R5428_CasPhi12 | CUUUCAAGACUAAUAGAUUGCUCCUUACG | 782 |
| | AGGAGACGCCCCUCUGGAUUGGGGAGC | |
| R5429_CasPhi12 | CUUUCAAGACUAAUAGAUUGCUCCUUACG | 783 |
| | AGGAGACCCCCUCUGGAUUGGGGAGCC | |
| R5430_CasPhi12 | CUUUCAAGACUAAUAGAUUGCUCCUUACG | 784 |
| | AGGAGACGGGAGCCUCGUGGGACUCAG | |
| R5431_CasPhi12 | CUUUCAAGACUAAUAGAUUGCUCCUUACG | 785 |
| | AGGAGACGUCUCCCCAUGCUGCUGCAG | |
| R5432_CasPhi12 | CUUUCAAGACUAAUAGAUUGCUCCUUACG | 786 |
| | AGGAGACUCCUCUGCUGCCUGAAGUAG | |
| R5433_CasPhi12 | CUUUCAAGACUAAUAGAUUGCUCCUUACG | 787 |
| | AGGAGACAGGCAGCAGAGGAGAAGUUC | |
| R5434_CasPhi12 | CUUUCAAGACUAAUAGAUUGCUCCUUACG | 788 |
| | AGGAGACAAAGGCUCGAUGGUGAACUU | |
| R5435_CasPhi12 | CUUUCAAGACUAAUAGAUUGCUCCUUACG | 789 |
| | AGGAGACGAAAGGCUCGAUGGUGAACU | |
| R5436_CasPhi12 | CUUUCAAGACUAAUAGAUUGCUCCUUACG | 790 |
| | AGGAGACACCAUCGAGCCUUUCAAAGC | |
| R5437_CasPhi12 | CUUUCAAGACUAAUAGAUUGCUCCUUACG | 791 |
| | AGGAGACGCUUUGAAAGGCUCGAUGGU | |
| R5438_CasPhi12 | CUUUCAAGACUAAUAGAUUGCUCCUUACG | 792 |
| | AGGAGACAGGGACUUGGCUUUGAAAGG | |
| R5439_CasPhi12 | CUUUCAAGACUAAUAGAUUGCUCCUUACG | 793 |
| | AGGAGACCAAAGCCAAGUCCCUGAAGG | |
| R5440_CasPhi12 | CUUUCAAGACUAAUAGAUUGCUCCUUACG | 794 |
| | AGGAGACAAAGCCAAGUCCCUGAAGGA | |
| R5441_CasPhi12 | CUUUCAAGACUAAUAGAUUGCUCCUUACG | 795 |
| | AGGAGACCACAUCCUUCAGGGACUUGG | |
| R5442_CasPhi12 | CUUUCAAGACUAAUAGAUUGCUCCUUACG | 796 |
| | AGGAGACCCAGGUCUUCCACAUCCUUC | |
| R5443_CasPhi12 | CUUUCAAGACUAAUAGAUUGCUCCUUACG | 797 |
| | AGGAGACCCCAGGUCUUCCACAUCCUU | |
| R5444_CasPhi12 | CUUUCAAGACUAAUAGAUUGCUCCUUACG | 798 |
| | AGGAGACCUCGGAAGACACAGCUGGGG | |
| R5445_CasPhi12 | CUUUCAAGACUAAUAGAUUGCUCCUUACG | 799 |
| | AGGAGACGGUCCCGAACAGCAGGGAGC | |
| R5446_CasPhi12 | CUUUCAAGACUAAUAGAUUGCUCCUUACG | 780 |
| | AGGAGACAGGUCCCGAACAGCAGGGAG | |
| R5447_CasPhi12 | CUUUCAAGACUAAUAGAUUGCUCCUUACG | 781 |
| | AGGAGACUUUAGGUCCCGAACAGCAGG | |
| R5448_CasPhi12 | CUUUCAAGACUAAUAGAUUGCUCCUUACG | 782 |
| | AGGAGACCUUUAGGUCCCGAACAGCAG | |
| R5449_CasPhi12 | CUUUCAAGACUAAUAGAUUGCUCCUUACG | 783 |
| | AGGAGACGGGACCUAAAGAAACUGGAG | |
| R5450_CasPhi12 | CUUUCAAGACUAAUAGAUUGCUCCUUACG | 784 |
| | AGGAGACGGGAAAGCCUGGGGGCCUGA | |
| R5451_CasPhi12 | CUUUCAAGACUAAUAGAUUGCUCCUUACG | 785 |
| | AGGAGACGGGGAAAGCCUGGGGGCCUG | |
| R5452_CasPhi12 | CUUUCAAGACUAAUAGAUUGCUCCUUACG | 786 |
| | AGGAGACCCCCAAACUGGUGCGGAUCC | |
| R5453_CasPhi12 | CUUUCAAGACUAAUAGAUUGCUCCUUACG | 787 |
| | AGGAGACCCCAAACUGGUGCGGAUCCU | |
| R5454_CasPhi12 | CUUUCAAGACUAAUAGAUUGCUCCUUACG | 788 |
| | AGGAGACUUCUCACUCAGCGCAUCCAG | |
| R5455_CasPhi12 | CUUUCAAGACUAAUAGAUUGCUCCUUACG | 789 |
| | AGGAGACAGCUGGGGGAAGGUGGCUGA | |
| R5456_CasPhi12 | CUUUCAAGACUAAUAGAUUGCUCCUUACG | 790 |
| | AGGAGACCCCCAGCUGAAGUCCUUGGA | |
| R5457_CasPhi12 | CUUUCAAGACUAAUAGAUUGCUCCUUACG | 791 |
| | AGGAGACCAAGGACUUCAGCUGGGGGA | |
| R5458_CasPhi12 | CUUUCAAGACUAAUAGAUUGCUCCUUACG | 792 |
| | AGGAGACCCAAGGACUUCAGCUGGGGG | |
| R5459_CasPhi12 | CUUUCAAGACUAAUAGAUUGCUCCUUACG | 793 |
| | AGGAGACAGGGUUUCCAAGGACUUCAG | |
| R5460_CasPhi12 | CUUUCAAGACUAAUAGAUUGCUCCUUACG | 794 |
| | AGGAGACUAGGCACCCAGGUCAGUGAU | |
| R5461_CasPhi12 | CUUUCAAGACUAAUAGAUUGCUCCUUACG | 795 |
| | AGGAGACGUAGGCACCCAGGUCAGUGA | |
| R5462_CasPhi12 | CUUUCAAGACUAAUAGAUUGCUCCUUACG | 796 |
| | AGGAGACGCUCGCUGCAUCCCUGCUCA | |
| R5463_CasPhi12 | CUUUCAAGACUAAUAGAUUGCUCCUUACG | 797 |
| | AGGAGACGCCUGAGCAGGGAUGCAGCG | |
| R5464_CasPhi12 | CUUUCAAGACUAAUAGAUUGCUCCUUACG | 798 |
| | AGGAGACUACAAUAACUGCAUCUGCGA | |
| R5465_CasPhi12 | CUUUCAAGACUAAUAGAUUGCUCCUUACG | 799 |
| | AGGAGACGCUCGUGUGCUUCCGGACAU | |
| R5466_CasPhi12 | CUUUCAAGACUAAUAGAUUGCUCCUUACG | 800 |
| | AGGAGACCGGACAUGGUGUCCCUCCGG | |
| R5467_CasPhi12 | CUUUCAAGACUAAUAGAUUGCUCCUUACG | 801 |
| | AGGAGACACGGCUGCCGGGGCCCAGCA | |
| R5468_CasPhi12 | CUUUCAAGACUAAUAGAUUGCUCCUUACG | 802 |
| | AGGAGACGGAGGUGUCCUCAUGUGGAG | |
| R5469_CasPhi12 | CUUUCAAGACUAAUAGAUUGCUCCUUACG | 803 |
| | AGGAGACCUGGACACUGAAUGGGAUGG | |
| R5470_CasPhi12 | CUUUCAAGACUAAUAGAUUGCUCCUUACG | 804 |
| | AGGAGACAGUGUCCAGGAACACCUGCA | |
| R5471_CasPhi12 | CUUUCAAGACUAAUAGAUUGCUCCUUACG | 805 |
| | AGGAGACCAGGUGUUCCUGGACACUGA | |
| R5472_CasPhi12 | CUUUCAAGACUAAUAGAUUGCUCCUUACG | 806 |
| | AGGAGACUUGCAGGUGUUCCUGGACAC | |
| R5473_CasPhi12 | CUUUCAAGACUAAUAGAUUGCUCCUUACG | 807 |
| | AGGAGACACGGAUCAGCCUGAGAUGAU | |

TABLE 9
CasΦ.12 gRNAs (DNA sequences) targeting human TRAC in T cells

| | Repeat + spacer RNA Sequence | SEQ |
|---|---|---|
| Name | (5′ --> 3′), shown as DNA | ID NO |
| R3040_CasPhi12 | CTTTCAAGACTAATAGATTGCTCCTTACGAGGAGACT | 808 |
| | GGATATCTGTGGGACAAGA | |
| R3041_CasPhi12 | CTTTCAAGACTAATAGATTGCTCCTTACGAGGAGACTC | 809 |
| | CCACAGATATCCAGAACC | |
| R3042_CasPhi12 | CTTTCAAGACTAATAGATTGCTCCTTACGAGGAGACG | 810 |
| | AGTCTCTCAGCTGGTACAC | |
| R3043_CasPhi12 | CTTTCAAGACTAATAGATTGCTCCTTACGAGGAGACA | 811 |
| | GAGTCTCTCAGCTGGTACA | |
| R3044_CasPhi12 | CTTTCAAGACTAATAGATTGCTCCTTACGAGGAGACTC | 812 |
| | ACTGGATTTAGAGTCTCT | |
| R3045_CasPhi12 | CTTTCAAGACTAATAGATTGCTCCTTACGAGGAGACA | 813 |
| | GAATCAAAATCGGTGAATA | |
| R3046_CasPhi12 | CTTTCAAGACTAATAGATTGCTCCTTACGAGGAGACG | 814 |
| | AGAATCAAAATCGGTGAAT | |
| R3047_CasPhi12 | CTTTCAAGACTAATAGATTGCTCCTTACGAGGAGACA | 815 |
| | CCGATTTTGATTCTCAAAC | |
| R3048_CasPhi12 | CTTTCAAGACTAATAGATTGCTCCTTACGAGGAGACTT | 816 |
| | TGAGAATCAAAATCGGTG | |
| R3049_CasPhi12 | CTTTCAAGACTAATAGATTGCTCCTTACGAGGAGACG | 817 |
| | TTTGAGAATCAAAATCGGT | |
| R3050_CasPhi12 | CTTTCAAGACTAATAGATTGCTCCTTACGAGGAGACT | 818 |
| | GATTCTCAAACAAATGTGT | |
| R3051_CasPhi12 | CTTTCAAGACTAATAGATTGCTCCTTACGAGGAGACG | 819 |
| | ATTCTCAAACAAATGTGTC | |
| R3052_CasPhi12 | CTTTCAAGACTAATAGATTGCTCCTTACGAGGAGACA | 820 |
| | TTCTCAAACAAATGTGTCA | |
| R3053_CasPhi12 | CTTTCAAGACTAATAGATTGCTCCTTACGAGGAGACT | 821 |
| | GACACATTTGTTTGAGAAT | |
| R3054_CasPhi12 | CTTTCAAGACTAATAGATTGCTCCTTACGAGGAGACTC | 822 |
| | AAACAAATGTGTCACAAA | |
| R3055_CasPhi12 | CTTTCAAGACTAATAGATTGCTCCTTACGAGGAGACG | 823 |
| | TGACACATTTGTTTGAGAA | |
| R3056_CasPhi12 | CTTTCAAGACTAATAGATTGCTCCTTACGAGGAGACCT | 824 |
| | TTGTGACACATTTGTTTG | |
| R3057_CasPhi12 | CTTTCAAGACTAATAGATTGCTCCTTACGAGGAGACT | 825 |
| | GATGTGTATATCACAGACA | |
| R3058_CasPhi12 | CTTTCAAGACTAATAGATTGCTCCTTACGAGGAGACTC | 826 |
| | TGTGATATACACATCAGA | |
| R3059_CasPhi12 | CTTTCAAGACTAATAGATTGCTCCTTACGAGGAGACG | 827 |
| | TCTGTGATATACACATCAG | |
| R3060_CasPhi12 | CTTTCAAGACTAATAGATTGCTCCTTACGAGGAGACT | 828 |
| | GTCTGTGATATACACATCA | |
| R3061_CasPhi12 | CTTTCAAGACTAATAGATTGCTCCTTACGAGGAGACA | 829 |
| | AGTCCATAGACCTCATGTC | |
| R3062_CasPhi12 | CTTTCAAGACTAATAGATTGCTCCTTACGAGGAGACCT | 830 |
| | CTTGAAGTCCATAGACCT | |
| R3063_CasPhi12 | CTTTCAAGACTAATAGATTGCTCCTTACGAGGAGACA | 831 |
| | AGAGCAACAGTGCTGTGGC | |
| R3064_CasPhi12 | CTTTCAAGACTAATAGATTGCTCCTTACGAGGAGACCT | 832 |
| | CCAGGCCACAGCACTGTT | |
| R3065_CasPhi12 | CTTTCAAGACTAATAGATTGCTCCTTACGAGGAGACTT | 833 |
| | GCTCCAGGCCACAGCACT | |
| R3066_CasPhi12 | CTTTCAAGACTAATAGATTGCTCCTTACGAGGAGACG | 834 |
| | TTGCTCCAGGCCACAGCAC | |
| R3067_CasPhi12 | CTTTCAAGACTAATAGATTGCTCCTTACGAGGAGACC | 835 |
| | ACATGCAAAGTCAGATTTG | |
| R3068_CasPhi12 | CTTTCAAGACTAATAGATTGCTCCTTACGAGGAGACG | 836 |
| | CACATGCAAAGTCAGATTT | |
| R3069_CasPhi12 | CTTTCAAGACTAATAGATTGCTCCTTACGAGGAGACG | 837 |
| | CATGTGCAAACGCCTTCAA | |
| R3070_CasPhi12 | CTTTCAAGACTAATAGATTGCTCCTTACGAGGAGACA | 838 |
| | AGGCGTTTGCACATGCAAA | |
| R3071_CasPhi12 | CTTTCAAGACTAATAGATTGCTCCTTACGAGGAGACC | 839 |
| | ATGTGCAAACGCCTTCAAC | |
| R3072_CasPhi12 | CTTTCAAGACTAATAGATTGCTCCTTACGAGGAGACTT | 840 |
| | GAAGGCGTTTGCACATGC | |
| R3073_CasPhi12 | CTTTCAAGACTAATAGATTGCTCCTTACGAGGAGACA | 841 |
| | ACAACAGCATTATTCCAGA | |
| R3074_CasPhi12 | CTTTCAAGACTAATAGATTGCTCCTTACGAGGAGACT | 842 |
| | GGAATAATGCTGTTGTTGA | |
| R3075_CasPhi12 | CTTTCAAGACTAATAGATTGCTCCTTACGAGGAGACTT | 843 |
| | CCAGAAGACACCTTCTTC | |
| R3076_CasPhi12 | CTTTCAAGACTAATAGATTGCTCCTTACGAGGAGACC | 844 |
| | AGAAGACACCTTCTTCCCC | |
| R3077_CasPhi12 | CTTTCAAGACTAATAGATTGCTCCTTACGAGGAGACC | 845 |
| | CTGGGCTGGGGAAGAAGGT | |
| R3078_CasPhi12 | CTTTCAAGACTAATAGATTGCTCCTTACGAGGAGACTT | 846 |
| | CCCCAGCCCAGGTAAGGG | |
| R3079_CasPhi12 | CTTTCAAGACTAATAGATTGCTCCTTACGAGGAGACC | 847 |
| | CCAGCCCAGGTAAGGGCAG | |
| R3080_CasPhi12 | CTTTCAAGACTAATAGATTGCTCCTTACGAGGAGACT | 848 |
| | AAAAGGAAAAACAGACATT | |
| R3081_CasPhi12 | CTTTCAAGACTAATAGATTGCTCCTTACGAGGAGACCT | 849 |
| | AAAAGGAAAAACAGACAT | |
| R3082_CasPhi12 | CTTTCAAGACTAATAGATTGCTCCTTACGAGGAGACTT | 850 |
| | CCTTTTAGAAAGTTCCTG | |
| R3083_CasPhi12 | CTTTCAAGACTAATAGATTGCTCCTTACGAGGAGACTC | 851 |
| | CTTTTAGAAAGTTCCTGT | |
| R3084_CasPhi12 | CTTTCAAGACTAATAGATTGCTCCTTACGAGGAGACC | 852 |
| | CTTTTAGAAAGTTCCTGTG | |
| R3085_CasPhi12 | CTTTCAAGACTAATAGATTGCTCCTTACGAGGAGACCT | 853 |
| | TTTAGAAAGTTCCTGTGA | |
| R3086_CasPhi12 | CTTTCAAGACTAATAGATTGCTCCTTACGAGGAGACT | 854 |
| | AGAAAGTTCCTGTGATGTC | |
| R3136_CasPhi12 | CTTTCAAGACTAATAGATTGCTCCTTACGAGGAGACA | 855 |
| | GAAAGTTCCTGTGATGTCA | |
| R3137_CasPhi12 | CTTTCAAGACTAATAGATTGCTCCTTACGAGGAGACG | 856 |
| | AAAGTTCCTGTGATGTCAA | |
| R3138_CasPhi12 | CTTTCAAGACTAATAGATTGCTCCTTACGAGGAGACA | 857 |
| | CATCACAGGAACTTTCTAA | |
| R3139_CasPhi12 | CTTTCAAGACTAATAGATTGCTCCTTACGAGGAGACCT | 858 |
| | GTGATGTCAAGCTGGTCG | |
| R3140_CasPhi12 | CTTTCAAGACTAATAGATTGCTCCTTACGAGGAGACTC | 859 |
| | GACCAGCTTGACATCACA | |
| R3141_CasPhi12 | CTTTCAAGACTAATAGATTGCTCCTTACGAGGAGACCT | 860 |
| | CGACCAGCTTGACATCAC | |
| R3142_CasPhi12 | CTTTCAAGACTAATAGATTGCTCCTTACGAGGAGACTC | 861 |
| | TCGACCAGCTTGACATCA | |
| R3143_CasPhi12 | CTTTCAAGACTAATAGATTGCTCCTTACGAGGAGACA | 862 |
| | AAGCTTTTCTCGACCAGCT | |
| R3144_CasPhi12 | CTTTCAAGACTAATAGATTGCTCCTTACGAGGAGACC | 863 |
| | AAAGCTTTTCTCGACCAGC | |
| R3145_CasPhi12 | CTTTCAAGACTAATAGATTGCTCCTTACGAGGAGACC | 864 |
| | CTGTTTCAAAGCTTTTCTC | |
| R3146_CasPhi12 | CTTTCAAGACTAATAGATTGCTCCTTACGAGGAGACG | 865 |
| | AAACAGGTAAGACAGGGGT | |
| R3147_CasPhi12 | CTTTCAAGACTAATAGATTGCTCCTTACGAGGAGACA | 866 |
| | AACAGGTAAGACAGGGGTC | |

TABLE 9.1
CasΦ.12 gRNAs targeting human TRAC in T cells

| SEQ ID NO | Repeat + spacer RNA Sequence (5′ --> 3′) |
|---|---|
| 2096 | CUUUCAAGACUAAUAGAUUGCUCCUUACGAGGAGACU |
| | GGAUAUCUGUGGGACAAGA |
| 2097 | CUUUCAAGACUAAUAGAUUGCUCCUUACGAGGAGACU |
| | CCCACAGAUAUCCAGAACC |
| 2098 | CUUUCAAGACUAAUAGAUUGCUCCUUACGAGGAGACG |
| | AGUCUCUCAGCUGGUACAC |
| 2099 | CUUUCAAGACUAAUAGAUUGCUCCUUACGAGGAGACA |
| | GAGUCUCUCAGCUGGUACA |
| 2100 | CUUUCAAGACUAAUAGAUUGCUCCUUACGAGGAGACU |
| | CACUGGAUUUAGAGUCUCU |
| 2101 | CUUUCAAGACUAAUAGAUUGCUCCUUACGAGGAGACA |
| | GAAUCAAAAUCGGUGAAUA |
| 2102 | CUUUCAAGACUAAUAGAUUGCUCCUUACGAGGAGACG |
| | AGAAUCAAAAUCGGUGAAU |
| 2103 | CUUUCAAGACUAAUAGAUUGCUCCUUACGAGGAGACA |
| | CCGAUUUUGAUUCUCAAAC |
| 2104 | CUUUCAAGACUAAUAGAUUGCUCCUUACGAGGAGACU |
| | UUGAGAAUCAAAAUCGGUG |
| 2105 | CUUUCAAGACUAAUAGAUUGCUCCUUACGAGGAGACG |
| | UUUGAGAAUCAAAAUCGGU |
| 2106 | CUUUCAAGACUAAUAGAUUGCUCCUUACGAGGAGACU |
| | GAUUCUCAAACAAAUGUGU |
| 2107 | CUUUCAAGACUAAUAGAUUGCUCCUUACGAGGAGACG |
| | AUUCUCAAACAAAUGUGUC |
| 2108 | CUUUCAAGACUAAUAGAUUGCUCCUUACGAGGAGACA |
| | UUCUCAAACAAAUGUGUCA |
| 2109 | CUUUCAAGACUAAUAGAUUGCUCCUUACGAGGAGACU |
| | GACACAUUUGUUUGAGAAU |
| 2110 | CUUUCAAGACUAAUAGAUUGCUCCUUACGAGGAGACU |
| | CAAACAAAUGUGUCACAAA |
| 2111 | CUUUCAAGACUAAUAGAUUGCUCCUUACGAGGAGACG |
| | UGACACAUUUGUUUGAGAA |
| 2112 | CUUUCAAGACUAAUAGAUUGCUCCUUACGAGGAGACC |
| | UUUGUGACACAUUUGUUUG |
| 2113 | CUUUCAAGACUAAUAGAUUGCUCCUUACGAGGAGACU |
| | GAUGUGUAUAUCACAGACA |
| 2114 | CUUUCAAGACUAAUAGAUUGCUCCUUACGAGGAGACU |
| | CUGUGAUAUACACAUCAGA |
| 2115 | CUUUCAAGACUAAUAGAUUGCUCCUUACGAGGAGACG |
| | UCUGUGAUAUACACAUCAG |
| 2116 | CUUUCAAGACUAAUAGAUUGCUCCUUACGAGGAGACU |
| | GUCUGUGAUAUACACAUCA |
| 2117 | CUUUCAAGACUAAUAGAUUGCUCCUUACGAGGAGACA |
| | AGUCCAUAGACCUCAUGUC |
| 2118 | CUUUCAAGACUAAUAGAUUGCUCCUUACGAGGAGACC |
| | UCUUGAAGUCCAUAGACCU |
| 2119 | CUUUCAAGACUAAUAGAUUGCUCCUUACGAGGAGACA |
| | AGAGCAACAGUGCUGUGGC |
| 2120 | CUUUCAAGACUAAUAGAUUGCUCCUUACGAGGAGACC |
| | UCCAGGCCACAGCACUGUU |
| 2121 | CUUUCAAGACUAAUAGAUUGCUCCUUACGAGGAGACU |
| | UGCUCCAGGCCACAGCACU |
| 2122 | CUUUCAAGACUAAUAGAUUGCUCCUUACGAGGAGACG |
| | UUGCUCCAGGCCACAGCAC |
| 2123 | CUUUCAAGACUAAUAGAUUGCUCCUUACGAGGAGACC |
| | ACAUGCAAAGUCAGAUUUG |
| 2124 | CUUUCAAGACUAAUAGAUUGCUCCUUACGAGGAGACG |
| | CACAUGCAAAGUCAGAUUU |
| 2125 | CUUUCAAGACUAAUAGAUUGCUCCUUACGAGGAGACG |
| | CAUGUGCAAACGCCUUCAA |
| 2126 | CUUUCAAGACUAAUAGAUUGCUCCUUACGAGGAGACA |
| | AGGCGUUUGCACAUGCAAA |
| 2127 | CUUUCAAGACUAAUAGAUUGCUCCUUACGAGGAGACC |
| | AUGUGCAAACGCCUUCAAC |
| 2128 | CUUUCAAGACUAAUAGAUUGCUCCUUACGAGGAGACU |
| | UGAAGGCGUUUGCACAUGC |
| 2129 | CUUUCAAGACUAAUAGAUUGCUCCUUACGAGGAGACA |
| | ACAACAGCAUUAUUCCAGA |
| 2130 | CUUUCAAGACUAAUAGAUUGCUCCUUACGAGGAGACU |
| | GGAAUAAUGCUGUUGUUGA |
| 2131 | CUUUCAAGACUAAUAGAUUGCUCCUUACGAGGAGACU |
| | UCCAGAAGACACCUUCUUC |
| 2132 | CUUUCAAGACUAAUAGAUUGCUCCUUACGAGGAGACC |
| | AGAAGACACCUUCUUCCCC |
| 2133 | CUUUCAAGACUAAUAGAUUGCUCCUUACGAGGAGACC |
| | CUGGGCUGGGGAAGAAGGU |
| 2134 | CUUUCAAGACUAAUAGAUUGCUCCUUACGAGGAGACU |
| | UCCCCAGCCCAGGUAAGGG |
| 2135 | CUUUCAAGACUAAUAGAUUGCUCCUUACGAGGAGACC |
| | CCAGCCCAGGUAAGGGCAG |
| 2136 | CUUUCAAGACUAAUAGAUUGCUCCUUACGAGGAGACU |
| | AAAAGGAAAAACAGACAUU |
| 2137 | CUUUCAAGACUAAUAGAUUGCUCCUUACGAGGAGACC |
| | UAAAAGGAAAAACAGACAU |
| 2138 | CUUUCAAGACUAAUAGAUUGCUCCUUACGAGGAGACU |
| | UCCUUUUAGAAAGUUCCUG |
| 2139 | CUUUCAAGACUAAUAGAUUGCUCCUUACGAGGAGACU |
| | CCUUUUAGAAAGUUCCUGU |
| 2140 | CUUUCAAGACUAAUAGAUUGCUCCUUACGAGGAGACC |
| | CUUUUAGAAAGUUCCUGUG |
| 2141 | CUUUCAAGACUAAUAGAUUGCUCCUUACGAGGAGACC |
| | UUUUAGAAAGUUCCUGUGA |
| 2142 | CUUUCAAGACUAAUAGAUUGCUCCUUACGAGGAGACU |
| | AGAAAGUUCCUGUGAUGUC |
| 2143 | CUUUCAAGACUAAUAGAUUGCUCCUUACGAGGAGACA |
| | GAAAGUUCCUGUGAUGUCA |
| 2144 | CUUUCAAGACUAAUAGAUUGCUCCUUACGAGGAGACG |
| | AAAGUUCCUGUGAUGUCAA |
| 2145 | CUUUCAAGACUAAUAGAUUGCUCCUUACGAGGAGACA |
| | CAUCACAGGAACUUUCUAA |
| 2146 | CUUUCAAGACUAAUAGAUUGCUCCUUACGAGGAGACC |
| | UGUGAUGUCAAGCUGGUCG |
| 2147 | CUUUCAAGACUAAUAGAUUGCUCCUUACGAGGAGACU |
| | CGACCAGCUUGACAUCACA |
| 2148 | CUUUCAAGACUAAUAGAUUGCUCCUUACGAGGAGACC |
| | UCGACCAGCUUGACAUCAC |
| 2149 | CUUUCAAGACUAAUAGAUUGCUCCUUACGAGGAGACU |
| | CUCGACCAGCUUGACAUCA |
| 2150 | CUUUCAAGACUAAUAGAUUGCUCCUUACGAGGAGACA |
| | AAGCUUUUCUCGACCAGCU |
| 2151 | CUUUCAAGACUAAUAGAUUGCUCCUUACGAGGAGACC |
| | AAAGCUUUUCUCGACCAGC |
| 2152 | CUUUCAAGACUAAUAGAUUGCUCCUUACGAGGAGACC |
| | CUGUUUCAAAGCUUUUCUC |
| 2153 | CUUUCAAGACUAAUAGAUUGCUCCUUACGAGGAGACG |
| | AAACAGGUAAGACAGGGGU |
| 2154 | CUUUCAAGACUAAUAGAUUGCUCCUUACGAGGAGACA |
| | AACAGGUAAGACAGGGGUC |

TABLE 10
CasΦ.32 gRNAs (DNA sequences) targeting human TRAC in T cells

| | Repeat + spacer RNA Sequence (5′ --> 3′), | SEQ ID |
|---|---|---|
| Name | shown as DNA | NO |
| R3040_CasPhi32 | GCTGGGGACCGATCCTGATTGCTCGCTGCGGCG | 867 |
| | AGACTGGATATCTGTGGGACAAGA | |
| R3041_CasPhi32 | GCTGGGGACCGATCCTGATTGCTCGCTGCGGCG | 868 |
| | AGACTCCCACAGATATCCAGAACC | |
| R3042_CasPhi32 | GCTGGGGACCGATCCTGATTGCTCGCTGCGGCG | 869 |
| | AGACGAGTCTCTCAGCTGGTACAC | |
| R3043_CasPhi32 | GCTGGGGACCGATCCTGATTGCTCGCTGCGGCG | 870 |
| | AGACAGAGTCTCTCAGCTGGTACA | |
| R3044_CasPhi32 | GCTGGGGACCGATCCTGATTGCTCGCTGCGGCG | 871 |
| | AGACTCACTGGATTTAGAGTCTCT | |
| R3045_CasPhi32 | GCTGGGGACCGATCCTGATTGCTCGCTGCGGCG | 872 |
| | AGACAGAATCAAAATCGGTGAATA | |
| R3046_CasPhi32 | GCTGGGGACCGATCCTGATTGCTCGCTGCGGCG | 873 |
| | AGACGAGAATCAAAATCGGTGAAT | |
| R3047_CasPhi32 | GCTGGGGACCGATCCTGATTGCTCGCTGCGGCG | 874 |
| | AGACACCGATTTTGATTCTCAAAC | |
| R3048_CasPhi32 | GCTGGGGACCGATCCTGATTGCTCGCTGCGGCG | 875 |
| | AGACTTTGAGAATCAAAATCGGTG | |
| R3049_CasPhi32 | GCTGGGGACCGATCCTGATTGCTCGCTGCGGCG | 876 |
| | AGACGTTTGAGAATCAAAATCGGT | |
| R3050_CasPhi32 | GCTGGGGACCGATCCTGATTGCTCGCTGCGGCG | 877 |
| | AGACTGATTCTCAAACAAATGTGT | |
| R3051_CasPhi32 | GCTGGGGACCGATCCTGATTGCTCGCTGCGGCG | 878 |
| | AGACGATTCTCAAACAAATGTGTC | |
| R3052_CasPhi32 | GCTGGGGACCGATCCTGATTGCTCGCTGCGGCG | 879 |
| | AGACATTCTCAAACAAATGTGTCA | |
| R3053_CasPhi32 | GCTGGGGACCGATCCTGATTGCTCGCTGCGGCG | 880 |
| | AGACTGACACATTTGTTTGAGAAT | |
| R3054_CasPhi32 | GCTGGGGACCGATCCTGATTGCTCGCTGCGGCG | 881 |
| | AGACTCAAACAAATGTGTCACAAA | |
| R3055_CasPhi32 | GCTGGGGACCGATCCTGATTGCTCGCTGCGGCG | 882 |
| | AGACGTGACACATTTGTTTGAGAA | |
| R3056_CasPhi32 | GCTGGGGACCGATCCTGATTGCTCGCTGCGGCG | 883 |
| | AGACCTTTGTGACACATTTGTTTG | |
| R3057_CasPhi32 | GCTGGGGACCGATCCTGATTGCTCGCTGCGGCG | 884 |
| | AGACTGATGTGTATATCACAGACA | |
| R3058_CasPhi32 | GCTGGGGACCGATCCTGATTGCTCGCTGCGGCG | 885 |
| | AGACTCTGTGATATACACATCAGA | |
| R3059_CasPhi32 | GCTGGGGACCGATCCTGATTGCTCGCTGCGGCG | 886 |
| | AGACGTCTGTGATATACACATCAG | |
| R3060_CasPhi32 | GCTGGGGACCGATCCTGATTGCTCGCTGCGGCG | 887 |
| | AGACTGTCTGTGATATACACATCA | |
| R3061_CasPhi32 | GCTGGGGACCGATCCTGATTGCTCGCTGCGGCG | 888 |
| | AGACAAGTCCATAGACCTCATGTC | |
| R3062_CasPhi32 | GCTGGGGACCGATCCTGATTGCTCGCTGCGGCG | 889 |
| | AGACCTCTTGAAGTCCATAGACCT | |
| R3063_CasPhi32 | GCTGGGGACCGATCCTGATTGCTCGCTGCGGCG | 890 |
| | AGACAAGAGCAACAGTGCTGTGGC | |
| R3064_CasPhi32 | GCTGGGGACCGATCCTGATTGCTCGCTGCGGCG | 891 |
| | AGACCTCCAGGCCACAGCACTGTT | |
| R3065_CasPhi32 | GCTGGGGACCGATCCTGATTGCTCGCTGCGGCG | 892 |
| | AGACTTGCTCCAGGCCACAGCACT | |
| R3066_CasPhi32 | GCTGGGGACCGATCCTGATTGCTCGCTGCGGCG | 893 |
| | AGACGTTGCTCCAGGCCACAGCAC | |
| R3067_CasPhi32 | GCTGGGGACCGATCCTGATTGCTCGCTGCGGCG | 894 |
| | AGACCACATGCAAAGTCAGATTTG | |
| R3068_CasPhi32 | GCTGGGGACCGATCCTGATTGCTCGCTGCGGCG | 895 |
| | AGACGCACATGCAAAGTCAGATTT | |
| R3069_CasPhi32 | GCTGGGGACCGATCCTGATTGCTCGCTGCGGCG | 896 |
| | AGACGCATGTGCAAACGCCTTCAA | |
| R3070_CasPhi32 | GCTGGGGACCGATCCTGATTGCTCGCTGCGGCG | 897 |
| | AGACAAGGCGTTTGCACATGCAAA | |
| R3071_CasPhi32 | GCTGGGGACCGATCCTGATTGCTCGCTGCGGCG | 898 |
| | AGACCATGTGCAAACGCCTTCAAC | |
| R3072_CasPhi32 | GCTGGGGACCGATCCTGATTGCTCGCTGCGGCG | 899 |
| | AGACTTGAAGGCGTTTGCACATGC | |
| R3073_CasPhi32 | GCTGGGGACCGATCCTGATTGCTCGCTGCGGCG | 900 |
| | AGACAACAACAGCATTATTCCAGA | |
| R3074_CasPhi32 | GCTGGGGACCGATCCTGATTGCTCGCTGCGGCG | 901 |
| | AGACTGGAATAATGCTGTTGTTGA | |
| R3075_CasPhi32 | GCTGGGGACCGATCCTGATTGCTCGCTGCGGCG | 902 |
| | AGACTTCCAGAAGACACCTTCTTC | |
| R3076_CasPhi32 | GCTGGGGACCGATCCTGATTGCTCGCTGCGGCG | 903 |
| | AGACCAGAAGACACCTTCTTCCCC | |
| R3077_CasPhi32 | GCTGGGGACCGATCCTGATTGCTCGCTGCGGCG | 904 |
| | AGACCCTGGGCTGGGGAAGAAGGT | |
| R3078_CasPhi32 | GCTGGGGACCGATCCTGATTGCTCGCTGCGGCG | 905 |
| | AGACTTCCCCAGCCCAGGTAAGGG | |
| R3079_CasPhi32 | GCTGGGGACCGATCCTGATTGCTCGCTGCGGCG | 906 |
| | AGACCCCAGCCCAGGTAAGGGCAG | |
| R3080_CasPhi32 | GCTGGGGACCGATCCTGATTGCTCGCTGCGGCG | 907 |
| | AGACTAAAAGGAAAAACAGACATT | |
| R3081_CasPhi32 | GCTGGGGACCGATCCTGATTGCTCGCTGCGGCG | 908 |
| | AGACCTAAAAGGAAAAACAGACAT | |
| R3082_CasPhi32 | GCTGGGGACCGATCCTGATTGCTCGCTGCGGCG | 909 |
| | AGACTTCCTTTTAGAAAGTTCCTG | |
| R3083_CasPhi32 | GCTGGGGACCGATCCTGATTGCTCGCTGCGGCG | 910 |
| | AGACTCCTTTTAGAAAGTTCCTGT | |
| R3084_CasPhi32 | GCTGGGGACCGATCCTGATTGCTCGCTGCGGCG | 911 |
| | AGACCCTTTTAGAAAGTTCCTGTG | |
| R3085_CasPhi32 | GCTGGGGACCGATCCTGATTGCTCGCTGCGGCG | 912 |
| | AGACCTTTTAGAAAGTTCCTGTGA | |
| R3086_CasPhi32 | GCTGGGGACCGATCCTGATTGCTCGCTGCGGCG | 913 |
| | AGACTAGAAAGTTCCTGTGATGTC | |
| R3136_CasPhi32 | GCTGGGGACCGATCCTGATTGCTCGCTGCGGCG | 914 |
| | AGACAGAAAGTTCCTGTGATGTCA | |
| R3137_CasPhi32 | GCTGGGGACCGATCCTGATTGCTCGCTGCGGCG | 915 |
| | AGACGAAAGTTCCTGTGATGTCAA | |
| R3138_CasPhi32 | GCTGGGGACCGATCCTGATTGCTCGCTGCGGCG | 916 |
| | AGACACATCACAGGAACTTTCTAA | |
| R3139_CasPhi32 | GCTGGGGACCGATCCTGATTGCTCGCTGCGGCG | 917 |
| | AGACCTGTGATGTCAAGCTGGTCG | |
| R3140_CasPhi32 | GCTGGGGACCGATCCTGATTGCTCGCTGCGGCG | 918 |
| | AGACTCGACCAGCTTGACATCACA | |
| R3141_CasPhi32 | GCTGGGGACCGATCCTGATTGCTCGCTGCGGCG | 919 |
| | AGACCTCGACCAGCTTGACATCAC | |
| R3142_CasPhi32 | GCTGGGGACCGATCCTGATTGCTCGCTGCGGCG | 920 |
| | AGACTCTCGACCAGCTTGACATCA | |
| R3143_CasPhi32 | GCTGGGGACCGATCCTGATTGCTCGCTGCGGCG | 921 |
| | AGACAAAGCTTTTCTCGACCAGCT | |
| R3144_CasPhi32 | GCTGGGGACCGATCCTGATTGCTCGCTGCGGCG | 922 |
| | AGACCAAAGCTTTTCTCGACCAGC | |
| R3145_CasPhi32 | GCTGGGGACCGATCCTGATTGCTCGCTGCGGCG | 923 |
| | AGACCCTGTTTCAAAGCTTTTCTC | |
| R3146_CasPhi32 | GCTGGGGACCGATCCTGATTGCTCGCTGCGGCG | 924 |
| | AGACGAAACAGGTAAGACAGGGGT | |
| R3147_CasPhi32 | GCTGGGGACCGATCCTGATTGCTCGCTGCGGCG | 925 |
| | AGACAAACAGGTAAGACAGGGGTC | |

TABLE 10.1
CasΦ.32 gRNAs targeting human TRAC in T cells

| SEQ ID NO | Repeat + spacer RNA Sequence (5′ --> 3′) |
|---|---|
| 2155 | GCUGGGGACCGAUCCUGAUUGCUCGCUGCGGCGAGACU |
| | GGAUAUCUGUGGGACAAGA |
| 2156 | GCUGGGGACCGAUCCUGAUUGCUCGCUGCGGCGAGACU |
| | CCCACAGAUAUCCAGAACC |
| 2157 | GCUGGGGACCGAUCCUGAUUGCUCGCUGCGGCGAGACG |
| | AGUCUCUCAGCUGGUACAC |
| 2158 | GCUGGGGACCGAUCCUGAUUGCUCGCUGCGGCGAGACA |
| | GAGUCUCUCAGCUGGUACA |
| 2159 | GCUGGGGACCGAUCCUGAUUGCUCGCUGCGGCGAGACU |
| | CACUGGAUUUAGAGUCUCU |
| 2160 | GCUGGGGACCGAUCCUGAUUGCUCGCUGCGGCGAGACA |
| | GAAUCAAAAUCGGUGAAUA |
| 2161 | GCUGGGGACCGAUCCUGAUUGCUCGCUGCGGCGAGACG |
| | AGAAUCAAAAUCGGUGAAU |
| 2162 | GCUGGGGACCGAUCCUGAUUGCUCGCUGCGGCGAGACA |
| | CCGAUUUUGAUUCUCAAAC |
| 2163 | GCUGGGGACCGAUCCUGAUUGCUCGCUGCGGCGAGACU |
| | UUGAGAAUCAAAAUCGGUG |
| 2164 | GCUGGGGACCGAUCCUGAUUGCUCGCUGCGGCGAGACG |
| | UUUGAGAAUCAAAAUCGGU |
| 2165 | GCUGGGGACCGAUCCUGAUUGCUCGCUGCGGCGAGACU |
| | GAUUCUCAAACAAAUGUGU |
| 2166 | GCUGGGGACCGAUCCUGAUUGCUCGCUGCGGCGAGACG |
| | AUUCUCAAACAAAUGUGUC |
| 2167 | GCUGGGGACCGAUCCUGAUUGCUCGCUGCGGCGAGACA |
| | UUCUCAAACAAAUGUGUCA |
| 2168 | GCUGGGGACCGAUCCUGAUUGCUCGCUGCGGCGAGACU |
| | GACACAUUUGUUUGAGAAU |
| 2169 | GCUGGGGACCGAUCCUGAUUGCUCGCUGCGGCGAGACU |
| | CAAACAAAUGUGUCACAAA |
| 2170 | GCUGGGGACCGAUCCUGAUUGCUCGCUGCGGCGAGACG |
| | UGACACAUUUGUUUGAGAA |
| 2171 | GCUGGGGACCGAUCCUGAUUGCUCGCUGCGGCGAGACC |
| | UUUGUGACACAUUUGUUUG |
| 2172 | GCUGGGGACCGAUCCUGAUUGCUCGCUGCGGCGAGACU |
| | GAUGUGUAUAUCACAGACA |
| 2173 | GCUGGGGACCGAUCCUGAUUGCUCGCUGCGGCGAGACU |
| | CUGUGAUAUACACAUCAGA |
| 2174 | GCUGGGGACCGAUCCUGAUUGCUCGCUGCGGCGAGACG |
| | UCUGUGAUAUACACAUCAG |
| 2175 | GCUGGGGACCGAUCCUGAUUGCUCGCUGCGGCGAGACU |
| | GUCUGUGAUAUACACAUCA |
| 2176 | GCUGGGGACCGAUCCUGAUUGCUCGCUGCGGCGAGACA |
| | AGUCCAUAGACCUCAUGUC |
| 2177 | GCUGGGGACCGAUCCUGAUUGCUCGCUGCGGCGAGACC |
| | UCUUGAAGUCCAUAGACCU |
| 2178 | GCUGGGGACCGAUCCUGAUUGCUCGCUGCGGCGAGACA |
| | AGAGCAACAGUGCUGUGGC |
| 2179 | GCUGGGGACCGAUCCUGAUUGCUCGCUGCGGCGAGACC |
| | UCCAGGCCACAGCACUGUU |
| 2180 | GCUGGGGACCGAUCCUGAUUGCUCGCUGCGGCGAGACU |
| | UGCUCCAGGCCACAGCACU |
| 2181 | GCUGGGGACCGAUCCUGAUUGCUCGCUGCGGCGAGACG |
| | UUGCUCCAGGCCACAGCAC |
| 2182 | GCUGGGGACCGAUCCUGAUUGCUCGCUGCGGCGAGACC |
| | ACAUGCAAAGUCAGAUUUG |
| 2183 | GCUGGGGACCGAUCCUGAUUGCUCGCUGCGGCGAGACG |
| | CACAUGCAAAGUCAGAUUU |
| 2184 | GCUGGGGACCGAUCCUGAUUGCUCGCUGCGGCGAGACG |
| | CAUGUGCAAACGCCUUCAA |
| 2185 | GCUGGGGACCGAUCCUGAUUGCUCGCUGCGGCGAGACA |
| | AGGCGUUUGCACAUGCAAA |
| 2186 | GCUGGGGACCGAUCCUGAUUGCUCGCUGCGGCGAGACC |
| | AUGUGCAAACGCCUUCAAC |
| 2187 | GCUGGGGACCGAUCCUGAUUGCUCGCUGCGGCGAGACU |
| | UGAAGGCGUUUGCACAUGC |
| 2188 | GCUGGGGACCGAUCCUGAUUGCUCGCUGCGGCGAGACA |
| | ACAACAGCAUUAUUCCAGA |
| 2189 | GCUGGGGACCGAUCCUGAUUGCUCGCUGCGGCGAGACU |
| | GGAAUAAUGCUGUUGUUGA |
| 2190 | GCUGGGGACCGAUCCUGAUUGCUCGCUGCGGCGAGACU |
| | UCCAGAAGACACCUUCUUC |
| 2191 | GCUGGGGACCGAUCCUGAUUGCUCGCUGCGGCGAGACC |
| | AGAAGACACCUUCUUCCCC |
| 2192 | GCUGGGGACCGAUCCUGAUUGCUCGCUGCGGCGAGACC |
| | CUGGGCUGGGGAAGAAGGU |
| 2193 | GCUGGGGACCGAUCCUGAUUGCUCGCUGCGGCGAGACU |
| | UCCCCAGCCCAGGUAAGGG |
| 2194 | GCUGGGGACCGAUCCUGAUUGCUCGCUGCGGCGAGACC |
| | CCAGCCCAGGUAAGGGCAG |
| 2195 | GCUGGGGACCGAUCCUGAUUGCUCGCUGCGGCGAGACU |
| | AAAAGGAAAAACAGACAUU |
| 2196 | GCUGGGGACCGAUCCUGAUUGCUCGCUGCGGCGAGACC |
| | UAAAAGGAAAAACAGACAU |
| 2197 | GCUGGGGACCGAUCCUGAUUGCUCGCUGCGGCGAGACU |
| | UCCUUUUAGAAAGUUCCUG |
| 2198 | GCUGGGGACCGAUCCUGAUUGCUCGCUGCGGCGAGACU |
| | CCUUUUAGAAAGUUCCUGU |
| 2199 | GCUGGGGACCGAUCCUGAUUGCUCGCUGCGGCGAGACC |
| | CUUUUAGAAAGUUCCUGUG |
| 2200 | GCUGGGGACCGAUCCUGAUUGCUCGCUGCGGCGAGACC |
| | UUUUAGAAAGUUCCUGUGA |
| 2201 | GCUGGGGACCGAUCCUGAUUGCUCGCUGCGGCGAGACU |
| | AGAAAGUUCCUGUGAUGUC |
| 2202 | GCUGGGGACCGAUCCUGAUUGCUCGCUGCGGCGAGACA |
| | GAAAGUUCCUGUGAUGUCA |
| 2203 | GCUGGGGACCGAUCCUGAUUGCUCGCUGCGGCGAGACG |
| | AAAGUUCCUGUGAUGUCAA |
| 2204 | GCUGGGGACCGAUCCUGAUUGCUCGCUGCGGCGAGACA |
| | CAUCACAGGAACUUUCUAA |
| 2205 | GCUGGGGACCGAUCCUGAUUGCUCGCUGCGGCGAGACC |
| | UGUGAUGUCAAGCUGGUCG |
| 2206 | GCUGGGGACCGAUCCUGAUUGCUCGCUGCGGCGAGACU |
| | CGACCAGCUUGACAUCACA |
| 2207 | GCUGGGGACCGAUCCUGAUUGCUCGCUGCGGCGAGACC |
| | UCGACCAGCUUGACAUCAC |
| 2208 | GCUGGGGACCGAUCCUGAUUGCUCGCUGCGGCGAGACU |
| | CUCGACCAGCUUGACAUCA |
| 2209 | GCUGGGGACCGAUCCUGAUUGCUCGCUGCGGCGAGACA |
| | AAGCUUUUCUCGACCAGCU |
| 2210 | GCUGGGGACCGAUCCUGAUUGCUCGCUGCGGCGAGACC |
| | AAAGCUUUUCUCGACCAGC |
| 2211 | GCUGGGGACCGAUCCUGAUUGCUCGCUGCGGCGAGACC |
| | CUGUUUCAAAGCUUUUCUC |
| 2212 | GCUGGGGACCGAUCCUGAUUGCUCGCUGCGGCGAGACG |
| | AAACAGGUAAGACAGGGGU |
| 2213 | GCUGGGGACCGAUCCUGAUUGCUCGCUGCGGCGAGACA |
| | AACAGGUAAGACAGGGGUC |

TABLE 11
CasΦ.12 gRNAs (DNA sequences) targeting human B2M in T cells

| | Repeat + spacer RNA Sequence (5′ --> 3′), | SEQ ID |
|---|---|---|
| Name | shown as DNA | NO |
| R3087_CasPhi12 | CTTTCAAGACTAATAGATTGCTCCTTACGAGGAG | 926 |
| | ACAATATAAGTGGAGGCGTCGC | |
| R3088_CasPhi12 | CTTTCAAGACTAATAGATTGCTCCTTACGAGGAG | 927 |
| | ACATATAAGTGGAGGCGTCGCG | |
| R3089_CasPhi12 | CTTTCAAGACTAATAGATTGCTCCTTACGAGGAG | 928 |
| | ACAGGAATGCCCGCCAGCGCGA | |
| R3090_CasPhi12 | CTTTCAAGACTAATAGATTGCTCCTTACGAGGAG | 929 |
| | ACCTGAAGCTGACAGCATTCGG | |
| R3091_CasPhi12 | CTTTCAAGACTAATAGATTGCTCCTTACGAGGAG | 930 |
| | ACGGGCCGAGATGTCTCGCTCC | |
| R3092_CasPhi12 | CTTTCAAGACTAATAGATTGCTCCTTACGAGGAG | 931 |
| | ACGCTGTGCTCGCGCTACTCTC | |
| R3093_CasPhi12 | CTTTCAAGACTAATAGATTGCTCCTTACGAGGAG | 932 |
| | ACCTGGCCTGGAGGCTATCCAG | |
| R3094_CasPhi12 | CTTTCAAGACTAATAGATTGCTCCTTACGAGGAG | 933 |
| | ACTGGCCTGGAGGCTATCCAGC | |
| R3095_CasPhi12 | CTTTCAAGACTAATAGATTGCTCCTTACGAGGAG | 934 |
| | ACATGTGTCTTTTCCCGATATT | |
| R3096_CasPhi12 | CTTTCAAGACTAATAGATTGCTCCTTACGAGGAG | 935 |
| | ACTCCCGATATTCCTCAGGTAC | |
| R3097_CasPhi12 | CTTTCAAGACTAATAGATTGCTCCTTACGAGGAG | 936 |
| | ACCCCGATATTCCTCAGGTACT | |
| R3098_CasPhi12 | CTTTCAAGACTAATAGATTGCTCCTTACGAGGAG | 937 |
| | ACCCGATATTCCTCAGGTACTC | |
| R3099_CasPhi12 | CTTTCAAGACTAATAGATTGCTCCTTACGAGGAG | 938 |
| | ACGAGTACCTGAGGAATATCGG | |
| R3100_CasPhi12 | CTTTCAAGACTAATAGATTGCTCCTTACGAGGAG | 939 |
| | ACGGAGTACCTGAGGAATATCG | |
| R3101_CasPhi12 | CTTTCAAGACTAATAGATTGCTCCTTACGAGGAG | 940 |
| | ACCTCAGGTACTCCAAAGATTC | |
| R3102_CasPhi12 | CTTTCAAGACTAATAGATTGCTCCTTACGAGGAG | 941 |
| | ACAGGTTTACTCACGTCATCCA | |
| R3103_CasPhi12 | CTTTCAAGACTAATAGATTGCTCCTTACGAGGAG | 942 |
| | ACACTCACGTCATCCAGCAGAG | |
| R3104_CasPhi12 | CTTTCAAGACTAATAGATTGCTCCTTACGAGGAG | 943 |
| | ACCTCACGTCATCCAGCAGAGA | |
| R3105_CasPhi12 | CTTTCAAGACTAATAGATTGCTCCTTACGAGGAG | 944 |
| | ACTCTGCTGGATGACGTGAGTA | |
| R3106_CasPhi12 | CTTTCAAGACTAATAGATTGCTCCTTACGAGGAG | 945 |
| | ACCATTCTCTGCTGGATGACGT | |
| R3107_CasPhi12 | CTTTCAAGACTAATAGATTGCTCCTTACGAGGAG | 946 |
| | ACCCATTCTCTGCTGGATGACG | |
| R3108_CasPhi12 | CTTTCAAGACTAATAGATTGCTCCTTACGAGGAG | 947 |
| | ACACTTTCCATTCTCTGCTGGA | |
| R3109_CasPhi12 | CTTTCAAGACTAATAGATTGCTCCTTACGAGGAG | 948 |
| | ACGACTTTCCATTCTCTGCTGG | |
| R3110_CasPhi12 | CTTTCAAGACTAATAGATTGCTCCTTACGAGGAG | 949 |
| | ACAGGAAATTTGACTTTCCATT | |
| R3111_CasPhi12 | CTTTCAAGACTAATAGATTGCTCCTTACGAGGAG | 950 |
| | ACCCTGAATTGCTATGTGTCTG | |
| R3112_CasPhi12 | CTTTCAAGACTAATAGATTGCTCCTTACGAGGAG | 951 |
| | ACCTGAATTGCTATGTGTCTGG | |
| R3113_CasPhi12 | CTTTCAAGACTAATAGATTGCTCCTTACGAGGAG | 952 |
| | ACCTATGTGTCTGGGTTTCATC | |
| R3114_CasPhi12 | CTTTCAAGACTAATAGATTGCTCCTTACGAGGAG | 953 |
| | ACAATGTCGGATGGATGAAACC | |
| R3115_CasPhi12 | CTTTCAAGACTAATAGATTGCTCCTTACGAGGAG | 954 |
| | ACCATCCATCCGACATTGAAGT | |
| R3116_CasPhi12 | CTTTCAAGACTAATAGATTGCTCCTTACGAGGAG | 955 |
| | ACATCCATCCGACATTGAAGTT | |
| R3117_CasPhi12 | CTTTCAAGACTAATAGATTGCTCCTTACGAGGAG | 956 |
| | ACAGTAAGTCAACTTCAATGTC | |
| R3118_CasPhi12 | CTTTCAAGACTAATAGATTGCTCCTTACGAGGAG | 957 |
| | ACTTCAGTAAGTCAACTTCAAT | |
| R3119_CasPhi12 | CTTTCAAGACTAATAGATTGCTCCTTACGAGGAG | 958 |
| | ACAAGTTGACTTACTGAAGAAT | |
| R3120_CasPhi12 | CTTTCAAGACTAATAGATTGCTCCTTACGAGGAG | 959 |
| | ACACTTACTGAAGAATGGAGAG | |
| R3121_CasPhi12 | CTTTCAAGACTAATAGATTGCTCCTTACGAGGAG | 960 |
| | ACTCTCTCCATTCTTCAGTAAG | |
| R3122_CasPhi12 | CTTTCAAGACTAATAGATTGCTCCTTACGAGGAG | 961 |
| | ACCTGAAGAATGGAGAGAGAAT | |
| R3123_CasPhi12 | CTTTCAAGACTAATAGATTGCTCCTTACGAGGAG | 962 |
| | ACAATTCTCTCTCCATTCTTCA | |
| R3124_CasPhi12 | CTTTCAAGACTAATAGATTGCTCCTTACGAGGAG | 963 |
| | ACCAATTCTCTCTCCATTCTTC | |
| R3125_CasPhi12 | CTTTCAAGACTAATAGATTGCTCCTTACGAGGAG | 964 |
| | ACTCAATTCTCTCTCCATTCTT | |
| R3126_CasPhi12 | CTTTCAAGACTAATAGATTGCTCCTTACGAGGAG | 965 |
| | ACTTCAATTCTCTCTCCATTCT | |
| R3127_CasPhi12 | CTTTCAAGACTAATAGATTGCTCCTTACGAGGAG | 966 |
| | ACAAAAAGTGGAGCATTCAGAC | |
| R3128_CasPhi12 | CTTTCAAGACTAATAGATTGCTCCTTACGAGGAG | 967 |
| | ACCTGAAAGACAAGTCTGAATG | |
| R3129_CasPhi12 | CTTTCAAGACTAATAGATTGCTCCTTACGAGGAG | 968 |
| | ACAGACTTGTCTTTCAGCAAGG | |
| R3130_CasPhi12 | CTTTCAAGACTAATAGATTGCTCCTTACGAGGAG | 969 |
| | ACTCTTTCAGCAAGGACTGGTC | |
| R3131_CasPhi12 | CTTTCAAGACTAATAGATTGCTCCTTACGAGGAG | 970 |
| | ACCAGCAAGGACTGGTCTTTCT | |
| R3132_CasPhi12 | CTTTCAAGACTAATAGATTGCTCCTTACGAGGAG | 971 |
| | ACAGCAAGGACTGGTCTTTCTA | |
| R3133_CasPhi12 | CTTTCAAGACTAATAGATTGCTCCTTACGAGGAG | 972 |
| | ACCTATCTCTTGTACTACACTG | |
| R3134_CasPhi12 | CTTTCAAGACTAATAGATTGCTCCTTACGAGGAG | 973 |
| | ACTATCTCTTGTACTACACTGA | |
| R3135_CasPhi12 | CTTTCAAGACTAATAGATTGCTCCTTACGAGGAG | 974 |
| | ACAGTGTAGTACAAGAGATAGA | |
| R3148_CasPhi12 | CTTTCAAGACTAATAGATTGCTCCTTACGAGGAG | 975 |
| | ACTACTACACTGAATTCACCCC | |
| R3149_CasPhi12 | CTTTCAAGACTAATAGATTGCTCCTTACGAGGAG | 976 |
| | ACAGTGGGGGTGAATTCAGTGT | |
| R3150_CasPhi12 | CTTTCAAGACTAATAGATTGCTCCTTACGAGGAG | 977 |
| | ACCAGTGGGGGTGAATTCAGTG | |
| R3151_CasPhi12 | CTTTCAAGACTAATAGATTGCTCCTTACGAGGAG | 978 |
| | ACTCAGTGGGGGTGAATTCAGT | |
| R3152_CasPhi12 | CTTTCAAGACTAATAGATTGCTCCTTACGAGGAG | 979 |
| | ACTTCAGTGGGGGTGAATTCAG | |
| R3153_CasPhi12 | CTTTCAAGACTAATAGATTGCTCCTTACGAGGAG | 980 |
| | ACACCCCCACTGAAAAAGATGA | |
| R3154_CasPhi12 | CTTTCAAGACTAATAGATTGCTCCTTACGAGGAG | 981 |
| | ACACACGGCAGGCATACTCATC | |
| R3155_CasPhi12 | CTTTCAAGACTAATAGATTGCTCCTTACGAGGAG | 982 |
| | ACGGCTGTGACAAAGTCACATG | |
| R3156_CasPhi12 | CTTTCAAGACTAATAGATTGCTCCTTACGAGGAG | 983 |
| | ACGTCACAGCCCAAGATAGTTA | |
| R3157_CasPhi12 | CTTTCAAGACTAATAGATTGCTCCTTACGAGGAG | 984 |
| | ACTCACAGCCCAAGATAGTTAA | |
| R3158_CasPhi12 | CTTTCAAGACTAATAGATTGCTCCTTACGAGGAG | 985 |
| | ACACTATCTTGGGCTGTGACAA | |
| R3159_CasPhi12 | CTTTCAAGACTAATAGATTGCTCCTTACGAGGAG | 986 |
| | ACCCCCACTTAACTATCTTGGG | |

TABLE 11.1
CasΦ.12 gRNAs targeting human B2M in T cells

| SEQ ID NO | Repeat + spacer RNA Sequence (5′ --> 3′) |
|---|---|
| 2214 | CUUUCAAGACUAAUAGAUUGCUCCUUACGAGGAGAC |
| | AAUAUAAGUGGAGGCGUCGC |
| 2215 | CUUUCAAGACUAAUAGAUUGCUCCUUACGAGGAGAC |
| | AUAUAAGUGGAGGCGUCGCG |
| 2216 | CUUUCAAGACUAAUAGAUUGCUCCUUACGAGGAGAC |
| | AGGAAUGCCCGCCAGCGCGA |
| 2217 | CUUUCAAGACUAAUAGAUUGCUCCUUACGAGGAGAC |
| | CUGAAGCUGACAGCAUUCGG |
| 2218 | CUUUCAAGACUAAUAGAUUGCUCCUUACGAGGAGAC |
| | GGGCCGAGAUGUCUCGCUCC |
| 2219 | CUUUCAAGACUAAUAGAUUGCUCCUUACGAGGAGAC |
| | GCUGUGCUCGCGCUACUCUC |
| 2220 | CUUUCAAGACUAAUAGAUUGCUCCUUACGAGGAGAC |
| | CUGGCCUGGAGGCUAUCCAG |
| 2221 | CUUUCAAGACUAAUAGAUUGCUCCUUACGAGGAGAC |
| | UGGCCUGGAGGCUAUCCAGC |
| 2222 | CUUUCAAGACUAAUAGAUUGCUCCUUACGAGGAGAC |
| | AUGUGUCUUUUCCCGAUAUU |
| 2223 | CUUUCAAGACUAAUAGAUUGCUCCUUACGAGGAGAC |
| | UCCCGAUAUUCCUCAGGUAC |
| 2224 | CUUUCAAGACUAAUAGAUUGCUCCUUACGAGGAGAC |
| | CCCGAUAUUCCUCAGGUACU |
| 2225 | CUUUCAAGACUAAUAGAUUGCUCCUUACGAGGAGAC |
| | CCGAUAUUCCUCAGGUACUC |
| 2226 | CUUUCAAGACUAAUAGAUUGCUCCUUACGAGGAGAC |
| | GAGUACCUGAGGAAUAUCGG |
| 2227 | CUUUCAAGACUAAUAGAUUGCUCCUUACGAGGAGAC |
| | GGAGUACCUGAGGAAUAUCG |
| 2228 | CUUUCAAGACUAAUAGAUUGCUCCUUACGAGGAGAC |
| | CUCAGGUACUCCAAAGAUUC |
| 2229 | CUUUCAAGACUAAUAGAUUGCUCCUUACGAGGAGAC |
| | AGGUUUACUCACGUCAUCCA |
| 2230 | CUUUCAAGACUAAUAGAUUGCUCCUUACGAGGAGAC |
| | ACUCACGUCAUCCAGCAGAG |
| 2231 | CUUUCAAGACUAAUAGAUUGCUCCUUACGAGGAGAC |
| | CUCACGUCAUCCAGCAGAGA |
| 2232 | CUUUCAAGACUAAUAGAUUGCUCCUUACGAGGAGAC |
| | UCUGCUGGAUGACGUGAGUA |
| 2233 | CUUUCAAGACUAAUAGAUUGCUCCUUACGAGGAGAC |
| | CAUUCUCUGCUGGAUGACGU |
| 2234 | CUUUCAAGACUAAUAGAUUGCUCCUUACGAGGAGAC |
| | CCAUUCUCUGCUGGAUGACG |
| 2235 | CUUUCAAGACUAAUAGAUUGCUCCUUACGAGGAGAC |
| | ACUUUCCAUUCUCUGCUGGA |
| 2236 | CUUUCAAGACUAAUAGAUUGCUCCUUACGAGGAGAC |
| | GACUUUCCAUUCUCUGCUGG |
| 2237 | CUUUCAAGACUAAUAGAUUGCUCCUUACGAGGAGAC |
| | AGGAAAUUUGACUUUCCAUU |
| 2238 | CUUUCAAGACUAAUAGAUUGCUCCUUACGAGGAGAC |
| | CCUGAAUUGCUAUGUGUCUG |
| 2239 | CUUUCAAGACUAAUAGAUUGCUCCUUACGAGGAGAC |
| | CUGAAUUGCUAUGUGUCUGG |
| 2240 | CUUUCAAGACUAAUAGAUUGCUCCUUACGAGGAGAC |
| | CUAUGUGUCUGGGUUUCAUC |
| 2241 | CUUUCAAGACUAAUAGAUUGCUCCUUACGAGGAGAC |
| | AAUGUCGGAUGGAUGAAACC |
| 2242 | CUUUCAAGACUAAUAGAUUGCUCCUUACGAGGAGAC |
| | CAUCCAUCCGACAUUGAAGU |
| 2243 | CUUUCAAGACUAAUAGAUUGCUCCUUACGAGGAGAC |
| | AUCCAUCCGACAUUGAAGUU |
| 2244 | CUUUCAAGACUAAUAGAUUGCUCCUUACGAGGAGAC |
| | AGUAAGUCAACUUCAAUGUC |
| 2245 | CUUUCAAGACUAAUAGAUUGCUCCUUACGAGGAGAC |
| | UUCAGUAAGUCAACUUCAAU |
| 2246 | CUUUCAAGACUAAUAGAUUGCUCCUUACGAGGAGAC |
| | AAGUUGACUUACUGAAGAAU |
| 2247 | CUUUCAAGACUAAUAGAUUGCUCCUUACGAGGAGAC |
| | ACUUACUGAAGAAUGGAGAG |
| 2248 | CUUUCAAGACUAAUAGAUUGCUCCUUACGAGGAGAC |
| | UCUCUCCAUUCUUCAGUAAG |
| 2249 | CUUUCAAGACUAAUAGAUUGCUCCUUACGAGGAGAC |
| | CUGAAGAAUGGAGAGAGAAU |
| 2250 | CUUUCAAGACUAAUAGAUUGCUCCUUACGAGGAGAC |
| | AAUUCUCUCUCCAUUCUUCA |
| 2251 | CUUUCAAGACUAAUAGAUUGCUCCUUACGAGGAGAC |
| | CAAUUCUCUCUCCAUUCUUC |
| 2252 | CUUUCAAGACUAAUAGAUUGCUCCUUACGAGGAGAC |
| | UCAAUUCUCUCUCCAUUCUU |
| 2253 | CUUUCAAGACUAAUAGAUUGCUCCUUACGAGGAGAC |
| | UUCAAUUCUCUCUCCAUUCU |
| 2254 | CUUUCAAGACUAAUAGAUUGCUCCUUACGAGGAGAC |
| | AAAAAGUGGAGCAUUCAGAC |
| 2255 | CUUUCAAGACUAAUAGAUUGCUCCUUACGAGGAGAC |
| | CUGAAAGACAAGUCUGAAUG |
| 2256 | CUUUCAAGACUAAUAGAUUGCUCCUUACGAGGAGAC |
| | AGACUUGUCUUUCAGCAAGG |
| 2257 | CUUUCAAGACUAAUAGAUUGCUCCUUACGAGGAGAC |
| | UCUUUCAGCAAGGACUGGUC |
| 2258 | CUUUCAAGACUAAUAGAUUGCUCCUUACGAGGAGAC |
| | CAGCAAGGACUGGUCUUUCU |
| 2259 | CUUUCAAGACUAAUAGAUUGCUCCUUACGAGGAGAC |
| | AGCAAGGACUGGUCUUUCUA |
| 2260 | CUUUCAAGACUAAUAGAUUGCUCCUUACGAGGAGAC |
| | CUAUCUCUUGUACUACACUG |
| 2261 | CUUUCAAGACUAAUAGAUUGCUCCUUACGAGGAGAC |
| | UAUCUCUUGUACUACACUGA |
| 2262 | CUUUCAAGACUAAUAGAUUGCUCCUUACGAGGAGAC |
| | AGUGUAGUACAAGAGAUAGA |
| 2263 | CUUUCAAGACUAAUAGAUUGCUCCUUACGAGGAGAC |
| | UACUACACUGAAUUCACCCC |
| 2264 | CUUUCAAGACUAAUAGAUUGCUCCUUACGAGGAGAC |
| | AGUGGGGGUGAAUUCAGUGU |
| 2265 | CUUUCAAGACUAAUAGAUUGCUCCUUACGAGGAGAC |
| | CAGUGGGGGUGAAUUCAGUG |
| 2266 | CUUUCAAGACUAAUAGAUUGCUCCUUACGAGGAGAC |
| | UCAGUGGGGGUGAAUUCAGU |
| 2267 | CUUUCAAGACUAAUAGAUUGCUCCUUACGAGGAGAC |
| | UUCAGUGGGGGUGAAUUCAG |
| 2268 | CUUUCAAGACUAAUAGAUUGCUCCUUACGAGGAGAC |
| | ACCCCCACUGAAAAAGAUGA |
| 2269 | CUUUCAAGACUAAUAGAUUGCUCCUUACGAGGAGAC |
| | ACACGGCAGGCAUACUCAUC |
| 2270 | CUUUCAAGACUAAUAGAUUGCUCCUUACGAGGAGAC |
| | GGCUGUGACAAAGUCACAUG |
| 2271 | CUUUCAAGACUAAUAGAUUGCUCCUUACGAGGAGAC |
| | GUCACAGCCCAAGAUAGUUA |
| 2272 | CUUUCAAGACUAAUAGAUUGCUCCUUACGAGGAGAC |
| | UCACAGCCCAAGAUAGUUAA |
| 2273 | CUUUCAAGACUAAUAGAUUGCUCCUUACGAGGAGAC |
| | ACUAUCUUGGGCUGUGACAA |
| 2274 | CUUUCAAGACUAAUAGAUUGCUCCUUACGAGGAGAC |
| | CCCCACUUAACUAUCUUGGG |
| 1381 | CUUUCAAGACUAAUAGAUUGCUCCUUACGAGGAGAC |
| | AGCAAGGACUGGUCUUUCUA |
| 1582 | CUUUCAAGACUAAUAGAUUGCUCCUUACGAGGAGAC |
| | GGGCCGAGAUGUCUCGCUCC |

TABLE 12
CasΦ.32 gRNAs (DNA sequences) targeting human B2M

| | Repeat + spacer RNA Sequence (5′ --> 3′), | SEQ |
|---|---|---|
| Name | shown as DNA | ID NO |
| R3087_CasPhi32 | GCTGGGGACCGATCCTGATTGCTCGCTGCGGCGAG | 987 |
| | ACAATATAAGTGGAGGCGTCGC | |
| R3088_CasPhi32 | GCTGGGGACCGATCCTGATTGCTCGCTGCGGCGAG | 988 |
| | ACATATAAGTGGAGGCGTCGCG | |
| R3089_CasPhi32 | GCTGGGGACCGATCCTGATTGCTCGCTGCGGCGAG | 989 |
| | ACAGGAATGCCCGCCAGCGCGA | |
| R3090_CasPhi32 | GCTGGGGACCGATCCTGATTGCTCGCTGCGGCGAG | 990 |
| | ACCTGAAGCTGACAGCATTCGG | |
| R3091_CasPhi32 | GCTGGGGACCGATCCTGATTGCTCGCTGCGGCGAG | 991 |
| | ACGGGCCGAGATGTCTCGCTCC | |
| R3092_CasPhi32 | GCTGGGGACCGATCCTGATTGCTCGCTGCGGCGAG | 992 |
| | ACGCTGTGCTCGCGCTACTCTC | |
| R3093_CasPhi32 | GCTGGGGACCGATCCTGATTGCTCGCTGCGGCGAG | 993 |
| | ACCTGGCCTGGAGGCTATCCAG | |
| R3094_CasPhi32 | GCTGGGGACCGATCCTGATTGCTCGCTGCGGCGAG | 994 |
| | ACTGGCCTGGAGGCTATCCAGC | |
| R3095_CasPhi32 | GCTGGGGACCGATCCTGATTGCTCGCTGCGGCGAG | 995 |
| | ACATGTGTCTTTTCCCGATATT | |
| R3096_CasPhi32 | GCTGGGGACCGATCCTGATTGCTCGCTGCGGCGAG | 996 |
| | ACTCCCGATATTCCTCAGGTAC | |
| R3097_CasPhi32 | GCTGGGGACCGATCCTGATTGCTCGCTGCGGCGAG | 997 |
| | ACCCCGATATTCCTCAGGTACT | |
| R3098_CasPhi32 | GCTGGGGACCGATCCTGATTGCTCGCTGCGGCGAG | 998 |
| | ACCCGATATTCCTCAGGTACTC | |
| R3099_CasPhi32 | GCTGGGGACCGATCCTGATTGCTCGCTGCGGCGAG | 999 |
| | ACGAGTACCTGAGGAATATCGG | |
| R3100_CasPhi32 | GCTGGGGACCGATCCTGATTGCTCGCTGCGGCGAG | 1000 |
| | ACGGAGTACCTGAGGAATATCG | |
| R3101_CasPhi32 | GCTGGGGACCGATCCTGATTGCTCGCTGCGGCGAG | 1001 |
| | ACCTCAGGTACTCCAAAGATTC | |
| R3102_CasPhi32 | GCTGGGGACCGATCCTGATTGCTCGCTGCGGCGAG | 1002 |
| | ACAGGTTTACTCACGTCATCCA | |
| R3103_CasPhi32 | GCTGGGGACCGATCCTGATTGCTCGCTGCGGCGAG | 1003 |
| | ACACTCACGTCATCCAGCAGAG | |
| R3104_CasPhi32 | GCTGGGGACCGATCCTGATTGCTCGCTGCGGCGAG | 1004 |
| | ACCTCACGTCATCCAGCAGAGA | |
| R3105_CasPhi32 | GCTGGGGACCGATCCTGATTGCTCGCTGCGGCGAG | 1005 |
| | ACTCTGCTGGATGACGTGAGTA | |
| R3106_CasPhi32 | GCTGGGGACCGATCCTGATTGCTCGCTGCGGCGAG | 1006 |
| | ACCATTCTCTGCTGGATGACGT | |
| R3107_CasPhi32 | GCTGGGGACCGATCCTGATTGCTCGCTGCGGCGAG | 1007 |
| | ACCCATTCTCTGCTGGATGACG | |
| R3108_CasPhi32 | GCTGGGGACCGATCCTGATTGCTCGCTGCGGCGAG | 1008 |
| | ACACTTTCCATTCTCTGCTGGA | |
| R3109_CasPhi32 | GCTGGGGACCGATCCTGATTGCTCGCTGCGGCGAG | 1009 |
| | ACGACTTTCCATTCTCTGCTGG | |
| R3110_CasPhi32 | GCTGGGGACCGATCCTGATTGCTCGCTGCGGCGAG | 1010 |
| | ACAGGAAATTTGACTTTCCATT | |
| R3111_CasPhi32 | GCTGGGGACCGATCCTGATTGCTCGCTGCGGCGAG | 1011 |
| | ACCCTGAATTGCTATGTGTCTG | |
| R3112_CasPhi32 | GCTGGGGACCGATCCTGATTGCTCGCTGCGGCGAG | 1012 |
| | ACCTGAATTGCTATGTGTCTGG | |
| R3113_CasPhi32 | GCTGGGGACCGATCCTGATTGCTCGCTGCGGCGAG | 1013 |
| | ACCTATGTGTCTGGGTTTCATC | |
| R3114_CasPhi32 | GCTGGGGACCGATCCTGATTGCTCGCTGCGGCGAG | 1014 |
| | ACAATGTCGGATGGATGAAACC | |
| R3115_CasPhi32 | GCTGGGGACCGATCCTGATTGCTCGCTGCGGCGAG | 1015 |
| | ACCATCCATCCGACATTGAAGT | |
| R3116_CasPhi32 | GCTGGGGACCGATCCTGATTGCTCGCTGCGGCGAG | 1016 |
| | ACATCCATCCGACATTGAAGTT | |
| R3117_CasPhi32 | GCTGGGGACCGATCCTGATTGCTCGCTGCGGCGAG | 1017 |
| | ACAGTAAGTCAACTTCAATGTC | |
| R3118_CasPhi32 | GCTGGGGACCGATCCTGATTGCTCGCTGCGGCGAG | 1018 |
| | ACTTCAGTAAGTCAACTTCAAT | |
| R3119_CasPhi32 | GCTGGGGACCGATCCTGATTGCTCGCTGCGGCGAG | 1019 |
| | ACAAGTTGACTTACTGAAGAAT | |
| R3120_CasPhi32 | GCTGGGGACCGATCCTGATTGCTCGCTGCGGCGAG | 1020 |
| | ACACTTACTGAAGAATGGAGAG | |
| R3121_CasPhi32 | GCTGGGGACCGATCCTGATTGCTCGCTGCGGCGAG | 1021 |
| | ACTCTCTCCATTCTTCAGTAAG | |
| R3122_CasPhi32 | GCTGGGGACCGATCCTGATTGCTCGCTGCGGCGAG | 1022 |
| | ACCTGAAGAATGGAGAGAGAAT | |
| R3123_CasPhi32 | GCTGGGGACCGATCCTGATTGCTCGCTGCGGCGAG | 1023 |
| | ACAATTCTCTCTCCATTCTTCA | |
| R3124_CasPhi32 | GCTGGGGACCGATCCTGATTGCTCGCTGCGGCGAG | 1024 |
| | ACCAATTCTCTCTCCATTCTTC | |
| R3125_CasPhi32 | GCTGGGGACCGATCCTGATTGCTCGCTGCGGCGAG | 1025 |
| | ACTCAATTCTCTCTCCATTCTT | |
| R3126_CasPhi32 | GCTGGGGACCGATCCTGATTGCTCGCTGCGGCGAG | 1026 |
| | ACTTCAATTCTCTCTCCATTCT | |
| R3127_CasPhi32 | GCTGGGGACCGATCCTGATTGCTCGCTGCGGCGAG | 1027 |
| | ACAAAAAGTGGAGCATTCAGAC | |
| R3128_CasPhi32 | GCTGGGGACCGATCCTGATTGCTCGCTGCGGCGAG | 1028 |
| | ACCTGAAAGACAAGTCTGAATG | |
| R3129_CasPhi32 | GCTGGGGACCGATCCTGATTGCTCGCTGCGGCGAG | 1029 |
| | ACAGACTTGTCTTTCAGCAAGG | |
| R3130_CasPhi32 | GCTGGGGACCGATCCTGATTGCTCGCTGCGGCGAG | 1030 |
| | ACTCTTTCAGCAAGGACTGGTC | |
| R3131_CasPhi32 | GCTGGGGACCGATCCTGATTGCTCGCTGCGGCGAG | 1031 |
| | ACCAGCAAGGACTGGTCTTTCT | |
| R3132_CasPhi32 | GCTGGGGACCGATCCTGATTGCTCGCTGCGGCGAG | 1032 |
| | ACAGCAAGGACTGGTCTTTCTA | |
| R3133_CasPhi32 | GCTGGGGACCGATCCTGATTGCTCGCTGCGGCGAG | 1033 |
| | ACCTATCTCTTGTACTACACTG | |
| R3134_CasPhi32 | GCTGGGGACCGATCCTGATTGCTCGCTGCGGCGAG | 1034 |
| | ACTATCTCTTGTACTACACTGA | |
| R3135_CasPhi32 | GCTGGGGACCGATCCTGATTGCTCGCTGCGGCGAG | 1035 |
| | ACAGTGTAGTACAAGAGATAGA | |
| R3148_CasPhi32 | GCTGGGGACCGATCCTGATTGCTCGCTGCGGCGAG | 1036 |
| | ACTACTACACTGAATTCACCCC | |
| R3149_CasPhi32 | GCTGGGGACCGATCCTGATTGCTCGCTGCGGCGAG | 1037 |
| | ACAGTGGGGGTGAATTCAGTGT | |
| R3150_CasPhi32 | GCTGGGGACCGATCCTGATTGCTCGCTGCGGCGAG | 1038 |
| | ACCAGTGGGGGTGAATTCAGTG | |
| R3151_CasPhi32 | GCTGGGGACCGATCCTGATTGCTCGCTGCGGCGAG | 1039 |
| | ACTCAGTGGGGGTGAATTCAGT | |
| R3152_CasPhi32 | GCTGGGGACCGATCCTGATTGCTCGCTGCGGCGAG | 1040 |
| | ACTTCAGTGGGGGTGAATTCAG | |
| R3153_CasPhi32 | GCTGGGGACCGATCCTGATTGCTCGCTGCGGCGAG | 1041 |
| | ACACCCCCACTGAAAAAGATGA | |
| R3154_CasPhi32 | GCTGGGGACCGATCCTGATTGCTCGCTGCGGCGAG | 1042 |
| | ACACACGGCAGGCATACTCATC | |
| R3155_CasPhi32 | GCTGGGGACCGATCCTGATTGCTCGCTGCGGCGAG | 1043 |
| | ACGGCTGTGACAAAGTCACATG | |
| R3156_CasPhi32 | GCTGGGGACCGATCCTGATTGCTCGCTGCGGCGAG | 1044 |
| | ACGTCACAGCCCAAGATAGTTA | |
| R3157_CasPhi32 | GCTGGGGACCGATCCTGATTGCTCGCTGCGGCGAG | 1045 |
| | ACTCACAGCCCAAGATAGTTAA | |
| R3158_CasPhi32 | GCTGGGGACCGATCCTGATTGCTCGCTGCGGCGAG | 1046 |
| | ACACTATCTTGGGCTGTGACAA | |
| R3159_CasPhi32 | GCTGGGGACCGATCCTGATTGCTCGCTGCGGCGAG | 1047 |
| | ACCCCCACTTAACTATCTTGGG | |

TABLE 12.1
CasΦ.32 gRNAs targeting human B2M

| SEQ ID NO | Repeat + spacer RNA Sequence (5′ --> 3′) |
|---|---|
| 2275 | GCUGGGGACCGAUCCUGAUUGCUCGCUGCGGCGAGACAAUAUAAG |
| | UGGAGGCGUCGC |
| 2276 | GCUGGGGACCGAUCCUGAUUGCUCGCUGCGGCGAGACAUAUAAGU |
| | GGAGGCGUCGCG |
| 2277 | GCUGGGGACCGAUCCUGAUUGCUCGCUGCGGCGAGACAGGAAUGCC |
| | CGCCAGCGCGA |
| 2278 | GCUGGGGACCGAUCCUGAUUGCUCGCUGCGGCGAGACCUGAAGCUG |
| | ACAGCAUUCGG |
| 2279 | GCUGGGGACCGAUCCUGAUUGCUCGCUGCGGCGAGACGGGCCGAGA |
| | UGUCUCGCUCC |
| 2280 | GCUGGGGACCGAUCCUGAUUGCUCGCUGCGGCGAGACGCUGUGCUC |
| | GCGCUACUCUC |
| 2281 | GCUGGGGACCGAUCCUGAUUGCUCGCUGCGGCGAGACCUGGCCUGG |
| | AGGCUAUCCAG |
| 2282 | GCUGGGGACCGAUCCUGAUUGCUCGCUGCGGCGAGACUGGCCUGGA |
| | GGCUAUCCAGC |
| 2283 | GCUGGGGACCGAUCCUGAUUGCUCGCUGCGGCGAGACAUGUGUCUU |
| | UUCCCGAUAUU |
| 2284 | GCUGGGGACCGAUCCUGAUUGCUCGCUGCGGCGAGACUCCCGAUAU |
| | UCCUCAGGUAC |
| 2285 | GCUGGGGACCGAUCCUGAUUGCUCGCUGCGGCGAGACCCCGAUAUU |
| | CCUCAGGUACU |
| 2286 | GCUGGGGACCGAUCCUGAUUGCUCGCUGCGGCGAGACCCGAUAUUC |
| | CUCAGGUACUC |
| 2287 | GCUGGGGACCGAUCCUGAUUGCUCGCUGCGGCGAGACGAGUACCUG |
| | AGGAAUAUCGG |
| 2288 | GCUGGGGACCGAUCCUGAUUGCUCGCUGCGGCGAGACGGAGUACCU |
| | GAGGAAUAUCG |
| 2289 | GCUGGGGACCGAUCCUGAUUGCUCGCUGCGGCGAGACCUCAGGUAC |
| | UCCAAAGAUUC |
| 2290 | GCUGGGGACCGAUCCUGAUUGCUCGCUGCGGCGAGACAGGUUUACU |
| | CACGUCAUCCA |
| 2291 | GCUGGGGACCGAUCCUGAUUGCUCGCUGCGGCGAGACACUCACGUC |
| | AUCCAGCAGAG |
| 2292 | GCUGGGGACCGAUCCUGAUUGCUCGCUGCGGCGAGACCUCACGUCA |
| | UCCAGCAGAGA |
| 2293 | GCUGGGGACCGAUCCUGAUUGCUCGCUGCGGCGAGACUCUGCUGGA |
| | UGACGUGAGUA |
| 2294 | GCUGGGGACCGAUCCUGAUUGCUCGCUGCGGCGAGACCAUUCUCUG |
| | CUGGAUGACGU |
| 2295 | GCUGGGGACCGAUCCUGAUUGCUCGCUGCGGCGAGACCCAUUCUCU |
| | GCUGGAUGACG |
| 2296 | GCUGGGGACCGAUCCUGAUUGCUCGCUGCGGCGAGACACUUUCCAU |
| | UCUCUGCUGGA |
| 2297 | GCUGGGGACCGAUCCUGAUUGCUCGCUGCGGCGAGACGACUUUCCA |
| | UUCUCUGCUGG |
| 2298 | GCUGGGGACCGAUCCUGAUUGCUCGCUGCGGCGAGACAGGAAAUU |
| | UGACUUUCCAUU |
| 2299 | GCUGGGGACCGAUCCUGAUUGCUCGCUGCGGCGAGACCCUGAAUUG |
| | CUAUGUGUCUG |
| 2300 | GCUGGGGACCGAUCCUGAUUGCUCGCUGCGGCGAGACCUGAAUUGC |
| | UAUGUGUCUGG |
| 2301 | GCUGGGGACCGAUCCUGAUUGCUCGCUGCGGCGAGACCUAUGUGUC |
| | UGGGUUUCAUC |
| 2302 | GCUGGGGACCGAUCCUGAUUGCUCGCUGCGGCGAGACAAUGUCGGA |
| | UGGAUGAAACC |
| 2303 | GCUGGGGACCGAUCCUGAUUGCUCGCUGCGGCGAGACCAUCCAUCC |
| | GACAUUGAAGU |
| 2304 | GCUGGGGACCGAUCCUGAUUGCUCGCUGCGGCGAGACAUCCAUCCG |
| | ACAUUGAAGUU |
| 2305 | GCUGGGGACCGAUCCUGAUUGCUCGCUGCGGCGAGACAGUAAGUCA |
| | ACUUCAAUGUC |
| 2306 | GCUGGGGACCGAUCCUGAUUGCUCGCUGCGGCGAGACUUCAGUAAG |
| | UCAACUUCAAU |
| 2307 | GCUGGGGACCGAUCCUGAUUGCUCGCUGCGGCGAGACAAGUUGACU |
| | UACUGAAGAAU |
| 2308 | GCUGGGGACCGAUCCUGAUUGCUCGCUGCGGCGAGACACUUACUGA |
| | AGAAUGGAGAG |
| 2309 | GCUGGGGACCGAUCCUGAUUGCUCGCUGCGGCGAGACUCUCUCCAU |
| | UCUUCAGUAAG |
| 2310 | GCUGGGGACCGAUCCUGAUUGCUCGCUGCGGCGAGACCUGAAGAAU |
| | GGAGAGAGAAU |
| 2311 | GCUGGGGACCGAUCCUGAUUGCUCGCUGCGGCGAGACAAUUCUCUC |
| | UCCAUUCUUCA |
| 2312 | GCUGGGGACCGAUCCUGAUUGCUCGCUGCGGCGAGACCAAUUCUCU |
| | CUCCAUUCUUC |
| 2313 | GCUGGGGACCGAUCCUGAUUGCUCGCUGCGGCGAGACUCAAUUCUC |
| | UCUCCAUUCUU |
| 2314 | GCUGGGGACCGAUCCUGAUUGCUCGCUGCGGCGAGACUUCAAUUCU |
| | CUCUCCAUUCU |
| 2315 | GCUGGGGACCGAUCCUGAUUGCUCGCUGCGGCGAGACAAAAAGUG |
| | GAGCAUUCAGAC |
| 2316 | GCUGGGGACCGAUCCUGAUUGCUCGCUGCGGCGAGACCUGAAAGAC |
| | AAGUCUGAAUG |
| 2317 | GCUGGGGACCGAUCCUGAUUGCUCGCUGCGGCGAGACAGACUUGUC |
| | UUUCAGCAAGG |
| 2318 | GCUGGGGACCGAUCCUGAUUGCUCGCUGCGGCGAGACUCUUUCAGC |
| | AAGGACUGGUC |
| 2319 | GCUGGGGACCGAUCCUGAUUGCUCGCUGCGGCGAGACCAGCAAGGA |
| | CUGGUCUUUCU |
| 2320 | GCUGGGGACCGAUCCUGAUUGCUCGCUGCGGCGAGACAGCAAGGAC |
| | UGGUCUUUCUA |
| 2321 | GCUGGGGACCGAUCCUGAUUGCUCGCUGCGGCGAGACCUAUCUCUU |
| | GUACUACACUG |
| 2322 | GCUGGGGACCGAUCCUGAUUGCUCGCUGCGGCGAGACUAUCUCUUG |
| | UACUACACUGA |
| 2323 | GCUGGGGACCGAUCCUGAUUGCUCGCUGCGGCGAGACAGUGUAGU |
| | ACAAGAGAUAGA |
| 2324 | GCUGGGGACCGAUCCUGAUUGCUCGCUGCGGCGAGACUACUACACU |
| | GAAUUCACCCC |
| 2325 | GCUGGGGACCGAUCCUGAUUGCUCGCUGCGGCGAGACAGUGGGGG |
| | UGAAUUCAGUGU |
| 2326 | GCUGGGGACCGAUCCUGAUUGCUCGCUGCGGCGAGACCAGUGGGGG |
| | UGAAUUCAGUG |
| 2327 | GCUGGGGACCGAUCCUGAUUGCUCGCUGCGGCGAGACUCAGUGGGG |
| | GUGAAUUCAGU |
| 2328 | GCUGGGGACCGAUCCUGAUUGCUCGCUGCGGCGAGACUUCAGUGGG |
| | GGUGAAUUCAG |
| 2329 | GCUGGGGACCGAUCCUGAUUGCUCGCUGCGGCGAGACACCCCCACU |
| | GAAAAAGAUGA |
| 2330 | GCUGGGGACCGAUCCUGAUUGCUCGCUGCGGCGAGACACACGGCAG |
| | GCAUACUCAUC |
| 2331 | GCUGGGGACCGAUCCUGAUUGCUCGCUGCGGCGAGACGGCUGUGAC |
| | AAAGUCACAUG |
| 2332 | GCUGGGGACCGAUCCUGAUUGCUCGCUGCGGCGAGACGUCACAGCC |
| | CAAGAUAGUUA |
| 2333 | GCUGGGGACCGAUCCUGAUUGCUCGCUGCGGCGAGACUCACAGCCC |
| | AAGAUAGUUAA |
| 2334 | GCUGGGGACCGAUCCUGAUUGCUCGCUGCGGCGAGACACUAUCUUG |
| | GGCUGUGACAA |
| 2335 | GCUGGGGACCGAUCCUGAUUGCUCGCUGCGGCGAGACCCCCACUUA |
| | ACUAUCUUGGG |

TABLE 13
CasΦ.32 gRNAs targeting human CIITA

| | Repeat + spacer sequence RNA | SEQ ID |
|---|---|---|
| Name | Sequence (5′ --> 3′) | NO |
| R4503_CasPhi32_C2TA_T1.1 | GCUGGGGACCGAUCCUGAUUGCUCGCUGCGGCGAGA | 1048 |
| | CCUACACAAUGCGUUGCCUGG | |
| R4504_CasPhi32_C2TA_T1.2 | GCUGGGGACCGAUCCUGAUUGCUCGCUGCGGCGAGA | 1049 |
| | CGGGCUCUGACAGGUAGGACC | |
| R4505_CasPhi32_C2TA_T1.3 | GCUGGGGACCGAUCCUGAUUGCUCGCUGCGGCGAGA | 1050 |
| | CUGUAGGAAUCCCAGCCAGGC | |
| R4506_CasPhi32_C2TA_T1.8 | GCUGGGGACCGAUCCUGAUUGCUCGCUGCGGCGAGA | 1051 |
| | CCCUGGCUCCACGCCCUGCUG | |
| R4507_CasPhi32_C2TA_T1.9 | GCUGGGGACCGAUCCUGAUUGCUCGCUGCGGCGAGA | 1052 |
| | CGGGAAGCUGAGGGCACGAGG | |
| R4508_CasPhi32_C2TA_T2.1 | GCUGGGGACCGAUCCUGAUUGCUCGCUGCGGCGAGA | 1053 |
| | CACAGCGAUGCUGACCCCCUG | |
| R4509_CasPhi32_C2TA_T2.2 | GCUGGGGACCGAUCCUGAUUGCUCGCUGCGGCGAGA | 1054 |
| | CUUAACAGCGAUGCUGACCCC | |
| R4510_CasPhi32_C2TA_T2.3 | GCUGGGGACCGAUCCUGAUUGCUCGCUGCGGCGAGA | 1055 |
| | CUAUGACCAGAUGGACCUGGC | |
| R4511_CasPhi32_C2TA_T2.4 | GCUGGGGACCGAUCCUGAUUGCUCGCUGCGGCGAGA | 1056 |
| | CGGGCCCCUAGAAGGUGGCUA | |
| R4512_CasPhi32_C2TA_T2.5 | GCUGGGGACCGAUCCUGAUUGCUCGCUGCGGCGAGA | 1057 |
| | CUAGGGGCCCCAACUCCAUGG | |
| R4513_CasPhi32_C2TA_T2.6 | GCUGGGGACCGAUCCUGAUUGCUCGCUGCGGCGAGA | 1058 |
| | CAGAAGCUCCAGGUAGCCACC | |
| R4514_CasPhi32_C2TA_T2.7 | GCUGGGGACCGAUCCUGAUUGCUCGCUGCGGCGAGA | 1059 |
| | CUCCAGCCAGGUCCAUCUGGU | |
| R4515_CasPhi32_C2TA_T2.8 | GCUGGGGACCGAUCCUGAUUGCUCGCUGCGGCGAGA | 1060 |
| | CUUCUCCAGCCAGGUCCAUCU | |

TABLE 14
Shortened CasΦ.12 gRNAs (DNA sequences) targeting human TRAC

| | | SEQ |
|---|---|---|
| | Repeat + spacer RNA Sequence (5′ --> 3′), | ID |
| Name | shown as DNA | NO |
| R3040_CasPhi12_S | ATTGCTCCTTACGAGGAGACTGGATATCTGTGGGACA | 1061 |
| R3041_CasPhi12_S | ATTGCTCCTTACGAGGAGACTCCCACAGATATCCAGA | 1062 |
| R3042_CasPhi12 S | ATTGCTCCTTACGAGGAGACGAGTCTCTCAGCTGGTA | 1063 |
| R3043_CasPhi12_S | ATTGCTCCTTACGAGGAGACAGAGTCTCTCAGCTGGT | 1064 |
| R3044_CasPhi12_S | ATTGCTCCTTACGAGGAGACTCACTGGATTTAGAGTC | 1065 |
| R3045_CasPhi12_S | ATTGCTCCTTACGAGGAGACAGAATCAAAATCGGTGA | 1066 |
| R3046_CasPhi12_S | ATTGCTCCTTACGAGGAGACGAGAATCAAAATCGGTG | 1067 |
| R3047_CasPhi12_S | ATTGCTCCTTACGAGGAGACACCGATTTTGATTCTCA | 1068 |
| R3048_CasPhi12_S | ATTGCTCCTTACGAGGAGACTTTGAGAATCAAAATCG | 1069 |
| R3049_CasPhi12 S | ATTGCTCCTTACGAGGAGACGTTTGAGAATCAAAATC | 1070 |
| R3050_CasPhi12_S | ATTGCTCCTTACGAGGAGACTGATTCTCAAACAAATG | 1071 |
| R3051_CasPhi12_S | ATTGCTCCTTACGAGGAGACGATTCTCAAACAAATGT | 1072 |
| R3052_CasPhi12_S | ATTGCTCCTTACGAGGAGACATTCTCAAACAAATGTG | 1073 |
| R3053_CasPhi12_S | ATTGCTCCTTACGAGGAGACTGACACATTTGTTTGAG | 1074 |
| R3054_CasPhi12_S | ATTGCTCCTTACGAGGAGACTCAAACAAATGTGTCAC | 1075 |
| R3055_CasPhi12_S | ATTGCTCCTTACGAGGAGACGTGACACATTTGTTTGA | 1076 |
| R3056_CasPhi12_S | ATTGCTCCTTACGAGGAGACCTTTGTGACACATTTGT | 1077 |
| R3057_CasPhi12_S | ATTGCTCCTTACGAGGAGACTGATGTGTATATCACAG | 1078 |
| R3058_CasPhi12_S | ATTGCTCCTTACGAGGAGACTCTGTGATATACACATC | 1079 |
| R3059_CasPhi12_S | ATTGCTCCTTACGAGGAGACGTCTGTGATATACACAT | 1080 |
| R3060_CasPhi12_S | ATTGCTCCTTACGAGGAGACTGTCTGTGATATACACA | 1081 |
| R3061_CasPhi12_S | ATTGCTCCTTACGAGGAGACAAGTCCATAGACCTCAT | 1082 |
| R3062_CasPhi12_S | ATTGCTCCTTACGAGGAGACCTCTTGAAGTCCATAGA | 1083 |
| R3063_CasPhi12 S | ATTGCTCCTTACGAGGAGACAAGAGCAACAGTGCTGT | 1084 |
| R3064_CasPhi12_S | ATTGCTCCTTACGAGGAGACCTCCAGGCCACAGCACT | 1085 |
| R3065_CasPhi12_S | ATTGCTCCTTACGAGGAGACTTGCTCCAGGCCACAGC | 1086 |
| R3066_CasPhi12_S | ATTGCTCCTTACGAGGAGACGTTGCTCCAGGCCACAG | 1087 |
| R3067_CasPhi12_S | ATTGCTCCTTACGAGGAGACCACATGCAAAGTCAGAT | 1088 |
| R3068_CasPhi12_S | ATTGCTCCTTACGAGGAGACGCACATGCAAAGTCAGA | 1089 |
| R3069_CasPhi12_S | ATTGCTCCTTACGAGGAGACGCATGTGCAAACGCCTT | 1090 |
| R3070_CasPhi12_S | ATTGCTCCTTACGAGGAGACAAGGCGTTTGCACATGC | 1091 |
| R3071_CasPhi12_S | ATTGCTCCTTACGAGGAGACCATGTGCAAACGCCTTC | 1092 |
| R3072_CasPhi12_S | ATTGCTCCTTACGAGGAGACTTGAAGGCGTTTGCACA | 1093 |
| R3073_CasPhi12_S | ATTGCTCCTTACGAGGAGACAACAACAGCATTATTCC | 1094 |
| R3074_CasPhi12_S | ATTGCTCCTTACGAGGAGACTGGAATAATGCTGTTGT | 1095 |
| R3075_CasPhi12_S | ATTGCTCCTTACGAGGAGACTTCCAGAAGACACCTTC | 1096 |
| R3076_CasPhi12_S | ATTGCTCCTTACGAGGAGACCAGAAGACACCTTCTTC | 1097 |
| R3077_CasPhi12_S | ATTGCTCCTTACGAGGAGACCCTGGGCTGGGGAAGAA | 1098 |
| R3078_CasPhi12_S | ATTGCTCCTTACGAGGAGACTTCCCCAGCCCAGGTAA | 1099 |
| R3079_CasPhi12_S | ATTGCTCCTTACGAGGAGACCCCAGCCCAGGTAAGGG | 1100 |
| R3080_CasPhi12_S | ATTGCTCCTTACGAGGAGACTAAAAGGAAAAACAGA | 1101 |
| | C | |
| R3081_CasPhi12_S | ATTGCTCCTTACGAGGAGACCTAAAAGGAAAAACAG | 1102 |
| | A | |
| R3082_CasPhi12_S | ATTGCTCCTTACGAGGAGACTTCCTTTTAGAAAGTTC | 1103 |
| R3083_CasPhi12_S | ATTGCTCCTTACGAGGAGACTCCTTTTAGAAAGTTCC | 1104 |
| R3084_CasPhi12 S | ATTGCTCCTTACGAGGAGACCCTTTTAGAAAGTTCCT | 1105 |
| R3085_CasPhi12_S | ATTGCTCCTTACGAGGAGACCTTTTAGAAAGTTCCTG | 1106 |
| R3086_CasPhi12_S | ATTGCTCCTTACGAGGAGACTAGAAAGTTCCTGTGAT | 1107 |
| R3136_CasPhi12_S | ATTGCTCCTTACGAGGAGACAGAAAGTTCCTGTGATG | 1108 |
| R3137_CasPhi12_S | ATTGCTCCTTACGAGGAGACGAAAGTTCCTGTGATGT | 1109 |
| R3138_CasPhi12_S | ATTGCTCCTTACGAGGAGACACATCACAGGAACTTTC | 1110 |
| R3139_CasPhi12 S | ATTGCTCCTTACGAGGAGACCTGTGATGTCAAGCTGG | 1111 |
| R3140_CasPhi12_S | ATTGCTCCTTACGAGGAGACTCGACCAGCTTGACATC | 1112 |
| R3141_CasPhi12_S | ATTGCTCCTTACGAGGAGACCTCGACCAGCTTGACAT | 1113 |
| R3142_CasPhi12_S | ATTGCTCCTTACGAGGAGACTCTCGACCAGCTTGACA | 1114 |
| R3143_CasPhi12_S | ATTGCTCCTTACGAGGAGACAAAGCTTTTCTCGACCA | 1115 |
| R3144_CasPhi12_S | ATTGCTCCTTACGAGGAGACCAAAGCTTTTCTCGACC | 1116 |
| R3145_CasPhi12_S | ATTGCTCCTTACGAGGAGACCCTGTTTCAAAGCTTTT | 1117 |
| R3146_CasPhi12_S | ATTGCTCCTTACGAGGAGACGAAACAGGTAAGACAG | 1118 |
| | G | |
| R3147_CasPhi12_S | ATTGCTCCTTACGAGGAGACAAACAGGTAAGACAGG | 1119 |
| | G | |

TABLE 14.1
Shortened_CasΦ.12 gRNAs targeting human TRAC

| SEQ ID NO | Repeat + spacer RNA Sequence (5′ --> 3′) |
|---|---|
| 2370 | AUUGCUCCUUACGAGGAGACUGGAUAUCUGUGGGACA |
| 2371 | AUUGCUCCUUACGAGGAGACUCCCACAGAUAUCCAGA |
| 2372 | AUUGCUCCUUACGAGGAGACGAGUCUCUCAGCUGGUA |
| 2373 | AUUGCUCCUUACGAGGAGACAGAGUCUCUCAGCUGGU |
| 2374 | AUUGCUCCUUACGAGGAGACUCACUGGAUUUAGAGUC |
| 2375 | AUUGCUCCUUACGAGGAGACAGAAUCAAAAUCGGUGA |
| 2376 | AUUGCUCCUUACGAGGAGACGAGAAUCAAAAUCGGUG |
| 2377 | AUUGCUCCUUACGAGGAGACACCGAUUUUGAUUCUCA |
| 2378 | AUUGCUCCUUACGAGGAGACUUUGAGAAUCAAAAUCG |
| 2379 | AUUGCUCCUUACGAGGAGACGUUUGAGAAUCAAAAUC |
| 2380 | AUUGCUCCUUACGAGGAGACUGAUUCUCAAACAAAUG |
| 2381 | AUUGCUCCUUACGAGGAGACGAUUCUCAAACAAAUGU |
| 2382 | AUUGCUCCUUACGAGGAGACAUUCUCAAACAAAUGUG |
| 2383 | AUUGCUCCUUACGAGGAGACUGACACAUUUGUUUGAG |
| 2384 | AUUGCUCCUUACGAGGAGACUCAAACAAAUGUGUCAC |
| 2385 | AUUGCUCCUUACGAGGAGACGUGACACAUUUGUUUGA |
| 2386 | AUUGCUCCUUACGAGGAGACCUUUGUGACACAUUUGU |
| 2387 | AUUGCUCCUUACGAGGAGACUGAUGUGUAUAUCACAG |
| 2388 | AUUGCUCCUUACGAGGAGACUCUGUGAUAUACACAUC |
| 2389 | AUUGCUCCUUACGAGGAGACGUCUGUGAUAUACACAU |
| 2390 | AUUGCUCCUUACGAGGAGACUGUCUGUGAUAUACACA |
| 2391 | AUUGCUCCUUACGAGGAGACAAGUCCAUAGACCUCAU |
| 2392 | AUUGCUCCUUACGAGGAGACCUCUUGAAGUCCAUAGA |
| 2393 | AUUGCUCCUUACGAGGAGACAAGAGCAACAGUGCUGU |
| 2394 | AUUGCUCCUUACGAGGAGACCUCCAGGCCACAGCACU |
| 2395 | AUUGCUCCUUACGAGGAGACUUGCUCCAGGCCACAGC |
| 2396 | AUUGCUCCUUACGAGGAGACGUUGCUCCAGGCCACAG |
| 2397 | AUUGCUCCUUACGAGGAGACCACAUGCAAAGUCAGAU |
| 2398 | AUUGCUCCUUACGAGGAGACGCACAUGCAAAGUCAGA |
| 2399 | AUUGCUCCUUACGAGGAGACGCAUGUGCAAACGCCUU |
| 2400 | AUUGCUCCUUACGAGGAGACAAGGCGUUUGCACAUGC |
| 2401 | AUUGCUCCUUACGAGGAGACCAUGUGCAAACGCCUUC |
| 2402 | AUUGCUCCUUACGAGGAGACUUGAAGGCGUUUGCACA |
| 2403 | AUUGCUCCUUACGAGGAGACAACAACAGCAUUAUUCC |
| 2404 | AUUGCUCCUUACGAGGAGACUGGAAUAAUGCUGUUGU |
| 2405 | AUUGCUCCUUACGAGGAGACUUCCAGAAGACACCUUC |
| 2406 | AUUGCUCCUUACGAGGAGACCAGAAGACACCUUCUUC |
| 2407 | AUUGCUCCUUACGAGGAGACCCUGGGCUGGGGAAGAA |
| 2408 | AUUGCUCCUUACGAGGAGACUUCCCCAGCCCAGGUAA |
| 2409 | AUUGCUCCUUACGAGGAGACCCCAGCCCAGGUAAGGG |
| 2410 | AUUGCUCCUUACGAGGAGACUAAAAGGAAAAACAGAC |
| 2411 | AUUGCUCCUUACGAGGAGACCUAAAAGGAAAAACAGA |
| 2412 | AUUGCUCCUUACGAGGAGACUUCCUUUUAGAAAGUUC |
| 2413 | AUUGCUCCUUACGAGGAGACUCCUUUUAGAAAGUUCC |
| 2414 | AUUGCUCCUUACGAGGAGACCCUUUUAGAAAGUUCCU |
| 2415 | AUUGCUCCUUACGAGGAGACCUUUUAGAAAGUUCCUG |
| 2416 | AUUGCUCCUUACGAGGAGACUAGAAAGUUCCUGUGAU |
| 2417 | AUUGCUCCUUACGAGGAGACAGAAAGUUCCUGUGAUG |
| 2418 | AUUGCUCCUUACGAGGAGACGAAAGUUCCUGUGAUGU |
| 2419 | AUUGCUCCUUACGAGGAGACACAUCACAGGAACUUUC |
| 2420 | AUUGCUCCUUACGAGGAGACCUGUGAUGUCAAGCUGG |
| 2421 | AUUGCUCCUUACGAGGAGACUCGACCAGCUUGACAUC |
| 2422 | AUUGCUCCUUACGAGGAGACCUCGACCAGCUUGACAU |
| 2423 | AUUGCUCCUUACGAGGAGACUCUCGACCAGCUUGACA |
| 2424 | AUUGCUCCUUACGAGGAGACAAAGCUUUUCUCGACCA |
| 2425 | AUUGCUCCUUACGAGGAGACCAAAGCUUUUCUCGACC |
| 2426 | AUUGCUCCUUACGAGGAGACCCUGUUUCAAAGCUUUU |
| 2427 | AUUGCUCCUUACGAGGAGACGAAACAGGUAAGACAGG |
| 2428 | AUUGCUCCUUACGAGGAGACAAACAGGUAAGACAGGG |
| 1354 | AUUGCUCCUUACGAGGAGACGAGUCUCUCAGCUGGUACAC |
| 1357 | AUUGCUCCUUACGAGGAGACGAGUCUCUCAGCUGGUA |

TABLE 15
Shortened CasΦ.12 gRNAs (DNA sequences) targeting human B2M

| | Repeat + spacer RNA Sequence (5′ --> 3′), | SEQ ID |
|---|---|---|
| Name | shown as DNA | NO |
| R3115_CasPhi12_S | ATTGCTCCTTACGAGGAGACCATCCATCCGACATTGA | 1120 |
| R3116_CasPhi12_S | ATTGCTCCTTACGAGGAGACATCCATCCGACATTGAA | 1121 |
| R3117_CasPhi12_S | ATTGCTCCTTACGAGGAGACAGTAAGTCAACTTCAAT | 1122 |
| R3118_CasPhi12_S | ATTGCTCCTTACGAGGAGACTTCAGTAAGTCAACTTC | 1123 |
| R3119_CasPhi12_S | ATTGCTCCTTACGAGGAGACAAGTTGACTTACTGAAG | 1124 |
| R3120_CasPhi12_S | ATTGCTCCTTACGAGGAGACACTTACTGAAGAATGGA | 1125 |
| R3121_CasPhi12_S | ATTGCTCCTTACGAGGAGACTCTCTCCATTCTTCAGT | 1126 |
| R3122_CasPhi12_S | ATTGCTCCTTACGAGGAGACCTGAAGAATGGAGAGAG | 1127 |
| R3123_CasPhi12_S | ATTGCTCCTTACGAGGAGACAATTCTCTCTCCATTCT | 1128 |
| R3124_CasPhi12_S | ATTGCTCCTTACGAGGAGACCAATTCTCTCTCCATTC | 1129 |
| R3125_CasPhi12_S | ATTGCTCCTTACGAGGAGACTCAATTCTCTCTCCATT | 1130 |
| R3126_CasPhi12_S | ATTGCTCCTTACGAGGAGACTTCAATTCTCTCTCCAT | 1131 |
| R3127_CasPhi12_S | ATTGCTCCTTACGAGGAGACAAAAAGTGGAGCATTCA | 1132 |
| R3128_CasPhi12_S | ATTGCTCCTTACGAGGAGACCTGAAAGACAAGTCTGA | 1133 |
| R3129_CasPhi12_S | ATTGCTCCTTACGAGGAGACAGACTTGTCTTTCAGCA | 1134 |
| R3130_CasPhi12_S | ATTGCTCCTTACGAGGAGACTCTTTCAGCAAGGACTG | 1135 |
| R3131_CasPhi12_S | ATTGCTCCTTACGAGGAGACCAGCAAGGACTGGTCTT | 1136 |
| R3132_CasPhi12_S | ATTGCTCCTTACGAGGAGACAGCAAGGACTGGTCTTT | 1137 |
| R3133_CasPhi12_S | ATTGCTCCTTACGAGGAGACCTATCTCTTGTACTACA | 1138 |
| R3134_CasPhi12_S | ATTGCTCCTTACGAGGAGACTATCTCTTGTACTACAC | 1139 |
| R3135_CasPhi12_S | ATTGCTCCTTACGAGGAGACAGTGTAGTACAAGAGAT | 1140 |
| R3148_CasPhi12_S | ATTGCTCCTTACGAGGAGACTACTACACTGAATTCAC | 1141 |
| R3149_CasPhil2_S | ATTGCTCCTTACGAGGAGACAGTGGGGGTGAATTCAG | 1142 |
| R3150_CasPhi12_S | ATTGCTCCTTACGAGGAGACCAGTGGGGGTGAATTCA | 1143 |
| R3151_CasPhi12_S | ATTGCTCCTTACGAGGAGACTCAGTGGGGGTGAATTC | 1144 |
| R3152_CasPhi12_S | ATTGCTCCTTACGAGGAGACTTCAGTGGGGGTGAATT | 1145 |
| R3153_CasPhi12_S | ATTGCTCCTTACGAGGAGACACCCCCACTGAAAAAGA | 1146 |
| R3154_CasPhi12_S | ATTGCTCCTTACGAGGAGACACACGGCAGGCATACTC | 1147 |
| R3155_CasPhi12_S | ATTGCTCCTTACGAGGAGACGGCTGTGACAAAGTCAC | 1148 |
| R3156_CasPhi12_S | ATTGCTCCTTACGAGGAGACGTCACAGCCCAAGATAG | 1149 |
| R3157_CasPhil2_S | ATTGCTCCTTACGAGGAGACTCACAGCCCAAGATAGT | 1150 |
| R3158_CasPhi12_S | ATTGCTCCTTACGAGGAGACACTATCTTGGGCTGTGA | 1151 |
| R3159_CasPhi12_S | ATTGCTCCTTACGAGGAGACCCCCACTTAACTATCTT | 1152 |

TABLE 15.1
Shortened CasΦ.12 gRNAs targeting human B2M

| SEQ ID | |
|---|---|
| NO | Repeat + spacer RNA Sequence (5′ --> 3′) |
| 2337 | AUUGCUCCUUACGAGGAGACCAUCCAUCCGACAUUGA |
| 2338 | AUUGCUCCUUACGAGGAGACAUCCAUCCGACAUUGAA |
| 2339 | AUUGCUCCUUACGAGGAGACAGUAAGUCAACUUCAAU |
| 2340 | AUUGCUCCUUACGAGGAGACUUCAGUAAGUCAACUUC |
| 2341 | AUUGCUCCUUACGAGGAGACAAGUUGACUUACUGAAG |
| 2342 | AUUGCUCCUUACGAGGAGACACUUACUGAAGAAUGGA |
| 2343 | AUUGCUCCUUACGAGGAGACUCUCUCCAUUCUUCAGU |
| 2344 | AUUGCUCCUUACGAGGAGACCUGAAGAAUGGAGAGAG |
| 2345 | AUUGCUCCUUACGAGGAGACAAUUCUCUCUCCAUUCU |
| 2346 | AUUGCUCCUUACGAGGAGACCAAUUCUCUCUCCAUUC |
| 2347 | AUUGCUCCUUACGAGGAGACUCAAUUCUCUCUCCAUU |
| 2348 | AUUGCUCCUUACGAGGAGACUUCAAUUCUCUCUCCAU |
| 2349 | AUUGCUCCUUACGAGGAGACAAAAAGUGGAGCAUUCA |
| 2350 | AUUGCUCCUUACGAGGAGACCUGAAAGACAAGUCUGA |
| 2351 | AUUGCUCCUUACGAGGAGACAGACUUGUCUUUCAGCA |
| 2352 | AUUGCUCCUUACGAGGAGACUCUUUCAGCAAGGACUG |
| 2353 | AUUGCUCCUUACGAGGAGACCAGCAAGGACUGGUCUU |
| 2354 | AUUGCUCCUUACGAGGAGACAGCAAGGACUGGUCUUU |
| 2355 | AUUGCUCCUUACGAGGAGACCUAUCUCUUGUACUACA |
| 2356 | AUUGCUCCUUACGAGGAGACUAUCUCUUGUACUACAC |
| 2357 | AUUGCUCCUUACGAGGAGACAGUGUAGUACAAGAGAU |
| 2358 | AUUGCUCCUUACGAGGAGACUACUACACUGAAUUCAC |
| 2359 | AUUGCUCCUUACGAGGAGACAGUGGGGGUGAAUUCAG |
| 2360 | AUUGCUCCUUACGAGGAGACCAGUGGGGGUGAAUUCA |
| 2361 | AUUGCUCCUUACGAGGAGACUCAGUGGGGGUGAAUUC |
| 2362 | AUUGCUCCUUACGAGGAGACUUCAGUGGGGGUGAAUU |
| 2363 | AUUGCUCCUUACGAGGAGACACCCCCACUGAAAAAGA |
| 2364 | AUUGCUCCUUACGAGGAGACACACGGCAGGCAUACUC |
| 2365 | AUUGCUCCUUACGAGGAGACGGCUGUGACAAAGUCAC |
| 2366 | AUUGCUCCUUACGAGGAGACGUCACAGCCCAAGAUAG |
| 2367 | AUUGCUCCUUACGAGGAGACUCACAGCCCAAGAUAGU |
| 2368 | AUUGCUCCUUACGAGGAGACACUAUCUUGGGCUGUGA |
| 2369 | AUUGCUCCUUACGAGGAGACCCCCACUUAACUAUCUU |

TABLE 16
Shortened CasΦ.12 gRNAs targeting human CIITA

| | | SEQ ID |
|---|---|---|
| Name | Repeat + spacer RNA Sequence (5′ --> 3′) | NO |
| R4503_CasPhi12 | AUUGCUCCUUACGAGGAGACCUACACAAUGCGUUGCC | 1153 |
| C2TA_T1.1_S | | |
| R4504_CasPhi12 | AUUGCUCCUUACGAGGAGACGGGCUCUGACAGGUAGG | 1154 |
| C2TA_T1.2_S | | |
| R4505_CasPhi12 | AUUGCUCCUUACGAGGAGACUGUAGGAAUCCCAGCCA | 1155 |
| C2TA_T1.3_S | | |
| R4506_CasPhi12 | AUUGCUCCUUACGAGGAGACCCUGGCUCCACGCCCUG | 1156 |
| C2TA_T1.8_S | | |
| R4507_CasPhi12 | AUUGCUCCUUACGAGGAGACGGGAAGCUGAGGGCACG | 1157 |
| C2TA_T1.9_S | | |
| R4508_CasPhi12 | AUUGCUCCUUACGAGGAGACACAGCGAUGCUGACCCC | 1158 |
| C2TA_T2.1_S | | |
| R4509_CasPhi12 | AUUGCUCCUUACGAGGAGACUUAACAGCGAUGCUGAC | 1159 |
| C2TA_T2.2_S | | |
| R4510_CasPhi12 | AUUGCUCCUUACGAGGAGACUAUGACCAGAUGGACCU | 1160 |
| C2TA_T2.3_S | | |
| R4511_CasPhi12 | AUUGCUCCUUACGAGGAGACGGGCCCCUAGAAGGUGG | 1161 |
| C2TA_T2.4_S | | |
| R4512_CasPhi12 | AUUGCUCCUUACGAGGAGACUAGGGGCCCCAACUCCA | 1162 |
| C2TA_T2.5_S | | |
| R4513_CasPhi12 | AUUGCUCCUUACGAGGAGACAGAAGCUCCAGGUAGCC | 1163 |
| C2TA_T2.6_S | | |
| R4514_CasPhi12 | AUUGCUCCUUACGAGGAGACUCCAGCCAGGUCCAUCU | 1164 |
| C2TA_T2.7_S | | |
| R4515_CasPhi12 | AUUGCUCCUUACGAGGAGACUUCUCCAGCCAGGUCCA | 1165 |
| C2TA_T2.8_S | | |
| R5200_CasPhi12_S | AUUGCUCCUUACGAGGAGACAGCAGGCUGUUGUGUGA | 1166 |
| R5201_CasPhil2_S | AUUGCUCCUUACGAGGAGACCAUGUCACACAACAGCC | 1167 |
| R5202_CasPhi12_S | AUUGCUCCUUACGAGGAGACUGUGACAUGGAAGGUGA | 1168 |
| R5203_CasPhi12_S | AUUGCUCCUUACGAGGAGACAUCACCUUCCAUGUCAC | 1169 |
| R5204_CasPhil2_S | AUUGCUCCUUACGAGGAGACGCAUAAGCCUCCCUGGU | 1170 |
| R5205_CasPhi12_S | AUUGCUCCUUACGAGGAGACCAGGACUCCCAGCUGGA | 1171 |
| R5206_CasPhil2_S | AUUGCUCCUUACGAGGAGACCUCAGGCCCUCCAGCUG | 1172 |
| R5207_CasPhi12_S | AUUGCUCCUUACGAGGAGACUGCUGGCAUCUCCAUAC | 1173 |
| R5208_CasPhi12_S | AUUGCUCCUUACGAGGAGACUGCCCAACUUCUGCUGG | 1174 |
| R5209_CasPhi12_S | AUUGCUCCUUACGAGGAGACCUGCCCAACUUCUGCUG | 1175 |
| R5210_CasPhi12_S | AUUGCUCCUUACGAGGAGACUCUGCCCAACUUCUGCU | 1176 |
| R5211_CasPhi12_S | AUUGCUCCUUACGAGGAGACUGACUUUUCUGCCCAAC | 1177 |
| R5212_CasPhi12_S | AUUGCUCCUUACGAGGAGACCUGACUUUUCUGCCCAA | 1178 |
| R5213_CasPhi12_S | AUUGCUCCUUACGAGGAGACUCUGACUUUUCUGCCCA | 1179 |
| R5214_CasPhi12_S | AUUGCUCCUUACGAGGAGACCCAGAGGAGCUUCCGGC | 1180 |
| R5215_CasPhi12_S | AUUGCUCCUUACGAGGAGACAGGUCUGCCGGAAGCUC | 1181 |
| R5216_CasPhil2_S | AUUGCUCCUUACGAGGAGACCGGCAGACCUGAAGCAC | 1182 |
| R5217_CasPhi12_S | AUUGCUCCUUACGAGGAGACCAGUGCUUCAGGUCUGC | 1183 |
| R5218_CasPhi12_S | AUUGCUCCUUACGAGGAGACAACAGCGCAGGCAGUGG | 1184 |
| R5219_CasPhil2_S | AUUGCUCCUUACGAGGAGACAACCAGGAGCCAGCCUC | 1185 |
| R5220_CasPhi12_S | AUUGCUCCUUACGAGGAGACUCCAGGCGCAUCUGGCC | 1186 |
| R5221_CasPhi12_S | AUUGCUCCUUACGAGGAGACCUCCAGGCGCAUCUGGC | 1187 |
| R5222_CasPhi12_S | AUUGCUCCUUACGAGGAGACUCUCCAGGCGCAUCUGG | 1188 |
| R5223_CasPhi12_S | AUUGCUCCUUACGAGGAGACCUCCAGUUCCUCGUUGA | 1189 |
| R5224_CasPhi12_S | AUUGCUCCUUACGAGGAGACUCCAGUUCCUCGUUGAG | 1190 |
| R5225_CasPhi12_S | AUUGCUCCUUACGAGGAGACAGGCAGCUCAACGAGGA | 1191 |
| R5226_CasPhi12_S | AUUGCUCCUUACGAGGAGACCUCGUUGAGCUGCCUGA | 1192 |
| R5227_CasPhi12_S | AUUGCUCCUUACGAGGAGACAGCUGCCUGAAUCUCCC | 1193 |
| R5228_CasPhi12_S | AUUGCUCCUUACGAGGAGACGUCCCCACCAUCUCCAC | 1194 |
| R5229_CasPhi12_S | AUUGCUCCUUACGAGGAGACUCCCCACCAUCUCCACU | 1195 |
| R5230_CasPhi12_S | AUUGCUCCUUACGAGGAGACCCAGAGCCCAUGGGGCA | 1196 |
| R5231_CasPhi12_S | AUUGCUCCUUACGAGGAGACGCCAGAGCCCAUGGGGC | 1197 |
| R5232_CasPhi12_S | AUUGCUCCUUACGAGGAGACCAGCCUCAGAGAUUUGC | 1198 |
| R5233_CasPhi12_S | AUUGCUCCUUACGAGGAGACGGAGGCCGUGGACAGUG | 1199 |
| R5234_CasPhi12_S | AUUGCUCCUUACGAGGAGACACUGUCCACGGCCUCCC | 1200 |
| R5235_CasPhi12_S | AUUGCUCCUUACGAGGAGACGCUCCAUCAGCCACUGA | 1201 |
| R5236_CasPhi12_S | AUUGCUCCUUACGAGGAGACAGGCAUGCUGGGCAGGU | 1202 |
| R5237_CasPhi12_S | AUUGCUCCUUACGAGGAGACCUCGGGAGGUCAGGGCA | 1203 |
| R5238_CasPhi12_S | AUUGCUCCUUACGAGGAGACGCUCGGGAGGUCAGGGC | 1204 |
| R5239_CasPhi12_S | AUUGCUCCUUACGAGGAGACGAGACCUCUCCAGCUGC | 1205 |
| R5240_CasPhi12_S | AUUGCUCCUUACGAGGAGACUUGGAGACCUCUCCAGC | 1206 |
| R5241_CasPhi12_S | AUUGCUCCUUACGAGGAGACGAAGCUUGUUGGAGACC | 1207 |
| R5242_CasPhi12_S | AUUGCUCCUUACGAGGAGACGGAAGCUUGUUGGAGAC | 1208 |
| R5243_CasPhi12_S | AUUGCUCCUUACGAGGAGACUGGAAGCUUGUUGGAGA | 1209 |
| R5244_CasPhi12_S | AUUGCUCCUUACGAGGAGACUACCGCUCACUGCAGGA | 1210 |
| R5245_CasPhi12_S | AUUGCUCCUUACGAGGAGACCUGCUGCUCCUCUCCAG | 1211 |
| R5246_CasPhi12_S | AUUGCUCCUUACGAGGAGACCCGCUCCAGGCUCUUGC | 1212 |
| R5247_CasPhi12_S | AUUGCUCCUUACGAGGAGACUGCCCAGUCCGGGGUGG | 1213 |
| R5248_CasPhi12_S | AUUGCUCCUUACGAGGAGACGGCCAGCUGCCGUUCUG | 1214 |
| R5249_CasPhi12_S | AUUGCUCCUUACGAGGAGACGCAGCCAACAGCACCUC | 1215 |
| R5250_CasPhil2_S | AUUGCUCCUUACGAGGAGACGCUGCCAAGGAGCACCG | 1216 |
| R5251_CasPhi12_S | AUUGCUCCUUACGAGGAGACCCCAGCACAGCAAUCAC | 1217 |
| R5252_CasPhi12_S | AUUGCUCCUUACGAGGAGACGCCCAGCACAGCAAUCA | 1218 |
| R5253_CasPhi12_S | AUUGCUCCUUACGAGGAGACCUGUGCUGGGCAAAGCU | 1219 |
| R5254_CasPhi12_S | AUUGCUCCUUACGAGGAGACCCCUGACCAGCUUUGCC | 1220 |
| R5255_CasPhi12_S | AUUGCUCCUUACGAGGAGACGGCUGGGGCAGUGAGCC | 1221 |
| R5256_CasPhi12_S | AUUGCUCCUUACGAGGAGACUGGCCGGCUUCCCCAGU | 1222 |
| R5257_CasPhi12_S | AUUGCUCCUUACGAGGAGACCCCAGUACGACUUUGUC | 1223 |
| R5258_CasPhi12_S | AUUGCUCCUUACGAGGAGACGUCUUCUCUGUCCCCUG | 1224 |
| R5259_CasPhi12_S | AUUGCUCCUUACGAGGAGACUCUUCUCUGUCCCCUGC | 1225 |
| R5260_CasPhi12_S | AUUGCUCCUUACGAGGAGACUCUGUCCCCUGCCAUUG | 1226 |
| R5261_CasPhi12_S | AUUGCUCCUUACGAGGAGACAAGCAAUGGCAGGGGAC | 1227 |
| R5262_CasPhi12_S | AUUGCUCCUUACGAGGAGACCUUGAACCGUCCGGGGG | 1228 |
| R5263_CasPhi12_S | AUUGCUCCUUACGAGGAGACAACCGUCCGGGGGAUGC | 1229 |
| R5264_CasPhi12_S | AUUGCUCCUUACGAGGAGACUCCCUGGGCCCACAGCC | 1230 |
| R5265_CasPhi12_S | AUUGCUCCUUACGAGGAGACAAGAUGUGGCUGAAAAC | 1231 |
| R5266_CasPhi12_S | AUUGCUCCUUACGAGGAGACUCAGCCACAUCUUGAAG | 1232 |
| R5267_CasPhi12_S | AUUGCUCCUUACGAGGAGACCAGCCACAUCUUGAAGA | 1233 |
| R5268_CasPhi12_S | AUUGCUCCUUACGAGGAGACAGCCACAUCUUGAAGAG | 1234 |
| R5269_CasPhi12_S | AUUGCUCCUUACGAGGAGACAAGAGACCUGACCGCGU | 1235 |
| R5270_CasPhi12_S | AUUGCUCCUUACGAGGAGACUGCUCAUCCUAGACGGC | 1236 |
| R5271_CasPhi12_S | AUUGCUCCUUACGAGGAGACCAGCUCCUCGAAGCCGU | 1237 |
| R5272_CasPhi12_S | AUUGCUCCUUACGAGGAGACCGCUUCCAGCUCCUCGA | 1238 |
| R5273_CasPhi12_S | AUUGCUCCUUACGAGGAGACGAGGAGCUGGAAGCGCA | 1239 |
| R5274_CasPhi12_S | AUUGCUCCUUACGAGGAGACCUGCACAGCACGUGCGG | 1240 |
| R5275_CasPhi12_S | AUUGCUCCUUACGAGGAGACUGGAAAAGGCCGGCCAG | 1241 |
| R5276_CasPhi12_S | AUUGCUCCUUACGAGGAGACUUCUGGAAAAGGCCGGC | 1242 |
| R5277_CasPhil2_S | AUUGCUCCUUACGAGGAGACUCCAGAAGAAGCUGCUC | 1243 |
| R5278_CasPhi12_S | AUUGCUCCUUACGAGGAGACCCAGAAGAAGCUGCUCC | 1244 |
| R5279_CasPhi12_S | AUUGCUCCUUACGAGGAGACCAGAAGAAGCUGCUCCG | 1245 |
| R5280_CasPhil2_S | AUUGCUCCUUACGAGGAGACCACCCUCCUCCUCACAG | 1246 |
| R5281_CasPhi12_S | AUUGCUCCUUACGAGGAGACCUCAGGCUCUGGACCAG | 1247 |
| R5282_CasPhi12_S | AUUGCUCCUUACGAGGAGACGAGCUGUCCGGCUUCUC | 1248 |
| R5283_CasPhi12_S | AUUGCUCCUUACGAGGAGACAGCUGUCCGGCUUCUCC | 1249 |
| R5284_CasPhi12_S | AUUGCUCCUUACGAGGAGACUCCAUGGAGCAGGCCCA | 1250 |
| R5285_CasPhi12_S | AUUGCUCCUUACGAGGAGACGAGAGCUCAGGGAUGAC | 1251 |
| R5286_CasPhi12_S | AUUGCUCCUUACGAGGAGACAGAGCUCAGGGAUGACA | 1252 |
| R5287_CasPhi12_S | AUUGCUCCUUACGAGGAGACGUGCUCUGUCAUCCCUG | 1253 |
| R5288_CasPhi12_S | AUUGCUCCUUACGAGGAGACUUCUCAGUCACAGCCAC | 1254 |
| R5289_CasPhi12_S | AUUGCUCCUUACGAGGAGACUCAGUCACAGCCACAGC | 1255 |
| R5290_CasPhi12_S | AUUGCUCCUUACGAGGAGACGUGCCGGGCAGUGUGCC | 1256 |
| R5291_CasPhi12_S | AUUGCUCCUUACGAGGAGACUGCCGGGCAGUGUGCCA | 1257 |
| R5292_CasPhi12_S | AUUGCUCCUUACGAGGAGACGCGUCCUCCCCAAGCUC | 1258 |
| R5293_CasPhi12_S | AUUGCUCCUUACGAGGAGACGGGAGGACGCCAAGCUG | 1259 |
| R5294_CasPhi12_S | AUUGCUCCUUACGAGGAGACGCCAGCUCUGCCAGGGC | 1260 |
| R5295_CasPhi12_S | AUUGCUCCUUACGAGGAGACAUGUCUGCGGCCCAGCU | 1261 |
| R5392_CasPhi12_S | AUUGCUCCUUACGAGGAGACGAUGUCUGCGGCCCAGC | 1262 |
| R5393_CasPhi12_S | AUUGCUCCUUACGAGGAGACCCAUCCGCAGACGUGAG | 1263 |
| R5394_CasPhi12_S | AUUGCUCCUUACGAGGAGACGCCAUCGCCCAGGUCCU | 1264 |
| R5395_CasPhi12_S | AUUGCUCCUUACGAGGAGACGGCCAUCGCCCAGGUCC | 1265 |
| R5396_CasPhi12_S | AUUGCUCCUUACGAGGAGACGACUAAGCCUUUGGCCA | 1266 |
| R5397_CasPhi12_S | AUUGCUCCUUACGAGGAGACGUCCAACACCCACCGCG | 1267 |
| R5398_CasPhi12_S | AUUGCUCCUUACGAGGAGACCAGGAGGAAGCUGGGGA | 1268 |
| R5399_CasPhil2_S | AUUGCUCCUUACGAGGAGACCCCAGCUUCCUCCUGCA | 1269 |
| R5400_CasPhi12_S | AUUGCUCCUUACGAGGAGACCUCCUGCAAUGCUUCCU | 1270 |
| R5401_CasPhi12_S | AUUGCUCCUUACGAGGAGACCUGGGGGCCCUGUGGCU | 1271 |
| R5402_CasPhil2_S | AUUGCUCCUUACGAGGAGACGCCACUCAGAGCCAGCC | 1272 |
| R5403_CasPhi12_S | AUUGCUCCUUACGAGGAGACCGCCACUCAGAGCCAGC | 1273 |
| R5404_CasPhi12_S | AUUGCUCCUUACGAGGAGACAUUUCGCCACUCAGAGC | 1274 |
| R5405_CasPhil2_S | AUUGCUCCUUACGAGGAGACUCCUUGAUUUCGCCACU | 1275 |
| R5406_CasPhi12_S | AUUGCUCCUUACGAGGAGACGGGUCAAUGCUAGGUAC | 1276 |
| R5407_CasPhi12_S | AUUGCUCCUUACGAGGAGACCUUGGGGUCAAUGCUAG | 1277 |
| R5408_CasPhi12_S | AUUGCUCCUUACGAGGAGACUUCCUUGGGGUCAAUGC | 1278 |
| R5409_CasPhi12_S | AUUGCUCCUUACGAGGAGACACCCCAAGGAAGAAGAG | 1279 |
| R5410_CasPhi12_S | AUUGCUCCUUACGAGGAGACUCAUAGGGCCUCUUCUU | 1280 |
| R5411_CasPhi12_S | AUUGCUCCUUACGAGGAGACCUGGCUGGGCUGAUCUU | 1281 |
| R5412_CasPhi12_S | AUUGCUCCUUACGAGGAGACUGGCUGGGCUGAUCUUC | 1282 |
| R5413_CasPhi12_S | AUUGCUCCUUACGAGGAGACCAGCCUCCCGCCCGCUG | 1283 |
| R5414_CasPhi12_S | AUUGCUCCUUACGAGGAGACCUGUCCACCGAGGCAGC | 1284 |
| R5415_CasPhi12_S | AUUGCUCCUUACGAGGAGACUGCUUCCUGUCCACCGA | 1285 |
| R5416_CasPhi12_S | AUUGCUCCUUACGAGGAGACAGGUACCUCGCAAGCAC | 1286 |
| R5417_CasPhi12_S | AUUGCUCCUUACGAGGAGACCGAGGUACCUGAAGCGG | 1287 |
| R5418_CasPhi12_S | AUUGCUCCUUACGAGGAGACCAGCCUCCUCGGCCUCG | 1288 |
| R5419_CasPhi12_S | AUUGCUCCUUACGAGGAGACGGCAGCACGUGGUACAG | 1289 |
| R5420_CasPhi12_S | AUUGCUCCUUACGAGGAGACGCAGCACGUGGUACAGG | 1290 |
| R5421_CasPhi12_S | AUUGCUCCUUACGAGGAGACUCUGGGCACCCGCCUCA | 1291 |
| R5422_CasPhi12_S | AUUGCUCCUUACGAGGAGACCUGGGCACCCGCCUCAC | 1292 |
| R5423_CasPhi12_S | AUUGCUCCUUACGAGGAGACUGGGCACCCGCCUCACG | 1293 |
| R5424_CasPhi12_S | AUUGCUCCUUACGAGGAGACCCCAGUACAUGUGCAUC | 1294 |
| R5425_CasPhi12_S | AUUGCUCCUUACGAGGAGACGCCCGCCGCCUCCAAGG | 1295 |
| R5426_CasPhi12_S | AUUGCUCCUUACGAGGAGACGAGGCGGCGGGCCAAGA | 1296 |
| R5427_CasPhi12_S | AUUGCUCCUUACGAGGAGACUCCCUGGACCUCCGCAG | 1297 |
| R5428_CasPhi12_S | AUUGCUCCUUACGAGGAGACGCCCCUCUGGAUUGGGG | 1298 |
| R5429_CasPhil2_S | AUUGCUCCUUACGAGGAGACCCCCUCUGGAUUGGGGA | 1299 |
| R5430_CasPhi12_S | AUUGCUCCUUACGAGGAGACGGGAGCCUCGUGGGACU | 1300 |
| R5431_CasPhi12_S | AUUGCUCCUUACGAGGAGACGUCUCCCCAUGCUGCUG | 1301 |
| R5432_CasPhi12_S | AUUGCUCCUUACGAGGAGACUCCUCUGCUGCCUGAAG | 1302 |
| R5433_CasPhi12_S | AUUGCUCCUUACGAGGAGACAGGCAGCAGAGGAGAAG | 1303 |
| R5434_CasPhi12_S | AUUGCUCCUUACGAGGAGACAAAGGCUCGAUGGUGAA | 1304 |
| R5435_CasPhi12_S | AUUGCUCCUUACGAGGAGACGAAAGGCUCGAUGGUGA | 1305 |
| R5436_CasPhi12_S | AUUGCUCCUUACGAGGAGACACCAUCGAGCCUUUCAA | 1306 |
| R5437_CasPhi12_S | AUUGCUCCUUACGAGGAGACGCUUUGAAAGGCUCGAU | 1307 |
| R5438_CasPhi12_S | AUUGCUCCUUACGAGGAGACAGGGACUUGGCUUUGAA | 1308 |
| R5439_CasPhi12_S | AUUGCUCCUUACGAGGAGACCAAAGCCAAGUCCCUGA | 1309 |
| R5440_CasPhi12_S | AUUGCUCCUUACGAGGAGACAAAGCCAAGUCCCUGAA | 1310 |
| R5441_CasPhi12_S | AUUGCUCCUUACGAGGAGACCACAUCCUUCAGGGACU | 1311 |
| R5442_CasPhi12_S | AUUGCUCCUUACGAGGAGACCCAGGUCUUCCACAUCC | 1312 |
| R5443_CasPhi12_S | AUUGCUCCUUACGAGGAGACCCCAGGUCUUCCACAUC | 1313 |
| R5444_CasPhi12_S | AUUGCUCCUUACGAGGAGACCUCGGAAGACACAGCUG | 1314 |
| R5445_CasPhi12_S | AUUGCUCCUUACGAGGAGACGGUCCCGAACAGCAGGG | 1315 |
| R5446_CasPhi12_S | AUUGCUCCUUACGAGGAGACAGGUCCCGAACAGCAGG | 1316 |
| R5447_CasPhi12_S | AUUGCUCCUUACGAGGAGACUUUAGGUCCCGAACAGC | 1317 |
| R5448_CasPhi12_S | AUUGCUCCUUACGAGGAGACCUUUAGGUCCCGAACAG | 1318 |
| R5449_CasPhi12_S | AUUGCUCCUUACGAGGAGACGGGACCUAAAGAAACUG | 1319 |
| R5450_CasPhi12_S | AUUGCUCCUUACGAGGAGACGGGAAAGCCUGGGGGCC | 1320 |
| R5451_CasPhi12_S | AUUGCUCCUUACGAGGAGACGGGGAAAGCCUGGGGGC | 1321 |
| R5452_CasPhi12_S | AUUGCUCCUUACGAGGAGACCCCCAAACUGGUGCGGA | 1322 |
| R5453_CasPhi12_S | AUUGCUCCUUACGAGGAGACCCCAAACUGGUGCGGAU | 1323 |
| R5454_CasPhil2_S | AUUGCUCCUUACGAGGAGACUUCUCACUCAGCGCAUC | 1324 |
| R5455_CasPhi12_S | AUUGCUCCUUACGAGGAGACAGCUGGGGGAAGGUGGC | 1325 |
| R5456_CasPhi12_S | AUUGCUCCUUACGAGGAGACCCCCAGCUGAAGUCCUU | 1326 |
| R5457_CasPhil2_S | AUUGCUCCUUACGAGGAGACCAAGGACUUCAGCUGGG | 1327 |
| R5458_CasPhi12_S | AUUGCUCCUUACGAGGAGACCCAAGGACUUCAGCUGG | 1328 |
| R5459_CasPhil2_S | AUUGCUCCUUACGAGGAGACAGGGUUUCCAAGGACUU | 1329 |
| R5460_CasPhi12_S | AUUGCUCCUUACGAGGAGACUAGGCACCCAGGUCAGU | 1330 |
| R5461_CasPhil2_S | AUUGCUCCUUACGAGGAGACGUAGGCACCCAGGUCAG | 1331 |
| R5462_CasPhi12_S | AUUGCUCCUUACGAGGAGACGCUCGCUGCAUCCCUGC | 1332 |
| R5463_CasPhi12_S | AUUGCUCCUUACGAGGAGACGCCUGAGCAGGGAUGCA | 1333 |
| R5464_CasPhil2_S | AUUGCUCCUUACGAGGAGACUACAAUAACUGCAUCUG | 1334 |
| R5465_CasPhi12_S | AUUGCUCCUUACGAGGAGACGCUCGUGUGCUUCCGGA | 1335 |
| R5466_CasPhil2_S | AUUGCUCCUUACGAGGAGACCGGACAUGGUGUCCCUC | 1336 |
| R5467_CasPhil2_S | AUUGCUCCUUACGAGGAGACACGGCUGCCGGGGCCCA | 1337 |
| R5468_CasPhi12_S | AUUGCUCCUUACGAGGAGACGGAGGUGUCCUCAUGUG | 1338 |
| R5469_CasPhil2_S | AUUGCUCCUUACGAGGAGACCUGGACACUGAAUGGGA | 1339 |
| R5470_CasPhi12_S | AUUGCUCCUUACGAGGAGACAGUGUCCAGGAACACCU | 1340 |
| R5471_CasPhil2_S | AUUGCUCCUUACGAGGAGACCAGGUGUUCCUGGACAC | 1341 |
| R5472_CasPhil2_S | AUUGCUCCUUACGAGGAGACUUGCAGGUGUUCCUGGA | 1342 |
| R5473_CasPhi12_S | AUUGCUCCUUACGAGGAGACACGGAUCAGCCUGAGAU | 1343 |

### EXAMPLES

### Example 1. AAV Vector Encoding CasΦ.12 and Guide RNAs Edit PCSK9 in Mammalian Cells

[0366] This example demonstrates that genome editing can be performed with an AAV vector encoding a Cas effector protein having a length of between 700 and 800 amino acids as depicted in FIG. 1 (CasΦ.12) and a guide RNA targeting PCSK9. Several guide RNAs with varying repeat lengths (nucleotide sequence that is capable of being non-covalently bound by an effector protein) of 36, 25, 20, or 19 nucleotides in combination with spacer lengths (nucleotide sequence that hybridizes to a target nucleic acid) of 20, 17, or 16 nucleotides were tested. Each guide RNA was cloned into an AAV vector with a U6 promoter to drive guide RNA expression, and an intron-less EF1alpha short (EFS) promoter driving CasΦ.12 expression. The AAV vector also included a polyA signal and 1 kb stuffer sequence. Hepal-6 mouse hepatoma cells were nucleofected with 10 μg of AAV plasmid. After 72 hours, genomic DNA was extracted and the frequency of indel mutations was determined using NGS.

[0367] FIG. 2 shows the frequency of CasΦ.12 induced indel mutations in Hepal-6 cells transduced with 10 μg of each AAV plasmid. In the graph legend, repeat and spacer lengths are indicated as the number of nucleotides in the repeat followed by the number of nucleotides in the spacer, e.g., 20-17 has a repeat length of 20 nucleotides and a spacer length of 17 nucleotides. The frequency of indel mutations is comparable to that of Cas9. This study demonstrates that a vector encoding a guide RNA and CasΦ.12 provide robust genome editing across different gRNA sequences and with gRNAs of different repeat and spacer lengths.

### Example 2: CasM.19952 edits genomic DNA in mammalian cells

[0368] CasM.19952 was tested for its ability to produce indels in HEK293T cells. Briefly, a plasmid encoding CasM.19952 and a guide RNA was delivered by lipofection to HEK293T cells. This was performed for a variety of guide RNAs targeting up to twenty-four loci adjacent to biochemically determined PAM sequences. Indels were detected by next generation sequencing of PCR amplicons at the targeted loci and indel percentage was calculated as the fraction of sequencing reads containing insertions or deletions relative to an unedited reference sequence. Sequencing libraries with less than 2000 of reads aligning to the reference sequence were excluded from the analysis for quality control purposes. “No plasmid” and SpyCas9 were included as negative and positive controls, respectively. FIG. 3 shows the results. TABLE 17 describes the sequences of the single guide RNAs tested that provided the greatest percent of reads with indels. Non-bold, non-italicized, capital letters indicate the tracrRNA sequence region of the guide RNA; italicized letters indicate a linker; bold letters indicate the repeat sequence; and the lowercase letters represent the spacer sequence. This experiment demonstrated that CasM.19952 is a robust editor of genomic DNA in mammalian cells.

[0369] A dose-response experiment confirmed the genome editing capability of CasM.19952 in mammalian cells. Plasmids encoding CasM.19952 and single guide RNAs were delivered at various concentrations by lipofection into HEK293T. CasM.19952 was programmed to target four loci. SpyCas9 was included as a positive control. Indels were observed at all four loci. Results are shown in FIG. 4.

TABLE 17
sgRNAs that provided genome editing with CasM.19952 in HEK293T cells

| | | % of |
|---|---|---|
| | | reads |
| sgRNA Sequence | | with |
| DNA Sequence | RNA Sequence | indels |
| TGGGGCAGTTGGTTGCCCTTAGCC | UGGGGCAGUUGGUUGCCCUUAGC | 13.47 |
| TGAGGCATTTATTGCACTCGGGAA | CUGAGGCAUUUAUUGCACUCGGG | |
| GTACCATTTCTCAGAAATGGTACA | AAGUACCAUUUCUCAGAAAUGGU | |
| TCCAACtctaggegcccgctaagttc (SEQ ID | ACAUCCAACucuaggcgcccgcuaaguuc | |
| NO: 1344) | (SEQ ID NO: 2429) | |
| TGGGGCAGTTGGTTGCCCTTAGCC | UGGGGCAGUUGGUUGCCCUUAGC | 4.63 |
| TGAGGCATTTATTGCACTCGGGAA | CUGAGGCAUUUAUUGCACUCGGG | |
| GTACCATTTCTCAGAAATGGTACA | AAGUACCAUUUCUCAGAAAUGGU | |
| TCCAACcccgggtaagcctgtctgct (SEQ ID | ACAUCCAACcccggguaagccugucugcu | |
| NO: 1345) | (SEQ ID NO: 2430) | |
| TGGGGCAGTTGGTTGCCCTTAGCC | UGGGGCAGUUGGUUGCCCUUAGC | 19.40 |
| TGAGGCATTTATTGCACTCGGGAA | CUGAGGCAUUUAUUGCACUCGGG | |
| GTACCATTTCTCAGAAATGGTACA | AAGUACCAUUUCUCAGAAAUGGU | |
| TCCAACcgtgctgtttcctccccacg (SEQ ID | ACAUCCAACcgugcuguuuccuccccacg | |
| NO: 1346) | (SEQ ID NO: 2431) | |
| TGGGGCAGTTGGTTGCCCTTAGCC | UGGGGCAGUUGGUUGCCCUUAGC | 3.15 |
| TGAGGCATTTATTGCACTCGGGAA | CUGAGGCAUUUAUUGCACUCGGG | |
| GTACCATTTCTCAGAAATGGTACA | AAGUACCAUUUCUCAGAAAUGGU | |
| TCCAACgtgccttagtttcttcatct (SEQ ID | ACAUCCAAgugccuuaguuuuucaucu | |
| NO: 1347) | (SEQ ID NO: 2432) | |
| TGGGGCAGTTGGTTGCCCTTAGCC | UGGGGCAGUUGGUUGCCCUUAGC | 18.35 |
| TGAGGCATTTATTGCACTCGGGAA | CUGAGGCAUUUAUUGCACUCGGG | |
| GTACCATTTCTCAGAAATGGTACA | AAGUACCAUUUCUCAGAAAUGGU | |
| TCCAACgggggcgggggggagaaaaa (SEQ | ACAUCCAACggggggggggggagaaaaa | |
| ID NO: 1348) | (SEQ ID NO: 2433) | |
| TGGGGCAGTTGGTTGCCCTTAGCC | UGGGGCAGUUGGUUGCCCUUAGC | 9.48 |
| TGAGGCATTTATTGCACTCGGGAA | CUGAGGCAUUUAUUGCACUCGGG | |
| GTACCATTTCTCAGAAATGGTACA | AAGUACCAUUUCUCAGAAAUGGU | |
| TCCAACgcgccctccgatctggggtg (SEQ | ACAUCCAACgcgcccuccgaucuggggug | |
| ID NO: 1349) | (SEQ ID NO: 2434) | |

### Example 3. PAM Requirement for CasΦ Determined by In Vitro Enrichment

[0370] This example illustrates the NTTN PAM requirement for CasΦ.2, CasΦ.4, CasΦ.11 and CasΦ.12. An in vitro enrichment (IVE) analysis was performed. The CasΦ polypeptides were complexed with crRNA to form 500 nM RNP complexes at room temperature in NEB CutSmart buffer (50 mM Potassium Acetate, 20 mM Tris-Acetate, 10 mM Magnesium Acetate, 100 μg/ml BSA, pH 7.9 at 25° C.) for 30 minutes in a volume of 25 l. crRNA sequences are provided in TABLE 2. The cleavage incubation was performed at 37° C. and the reaction was quenched after 30 minutes. The substrate for the cleavage incubation was a pooled plasmid library which includes different PAM sequences. After quenching, the cleavage reactions were cleaned using Beckman SPRi beads. The samples were sequenced to identify which PAM sequences enabled target cleavage by the CasΦ polypeptides. As shown in FIG. 5A, this analysis revealed an NTTN PAM requirement for CasΦ.2, CasΦ.4, CasΦ.11 and CasΦ.12.

[0371] The inventors went on to assess the PAM requirement of CasΦ.20, CasΦ.26, CasΦ.32, CasΦ.38 and CasΦ.45. An IVE analysis was performed using the protocol described above for CasΦ.2, CasΦ.4, CasΦ.11 and CasΦ.12. As shown in FIG. 5B, Sanger sequencing revealed a NTNN PAM requirement for CasΦ.20, a NTTG PAM requirement for CasΦ.26, a GTTN PAM requirement for CasΦ.32 and CasΦ.38, and a NTTN PAM requirement for CasΦ.45.

[0372] The inventors also determined a single-base PAM requirement for CasΦ.20, CasΦ.24 and CasΦ.25. Amino acid sequences of the proteins used are shown in TABLE 1. The CasΦ polypeptides were complexed with their native crRNAs to form RNP complexes at room temperature for 20 minutes. crRNA sequences are provided in TABLE 2. The RNP complexes were incubated with target DNA at 37° C. for 60 minutes in NEB CutSmart buffer (50 mM Potassium Acetate, 20 mM Tris-Acetate, 10 mM Magnesium Acetate, 100 μg/ml BSA, pH 7.9 at 25° C.). The RNPs were then used in cleavage reactions with plasmid DNA comprising a target sequence and a PAM. Stating with a TTTg PAM, the PAM was mutated to each of the sequences shown in FIG. 5C to assess the PAM requirement. The products of the cleavage reactions were analyzed by gel electrophoresis, as seen in FIG. 5C. FIG. 5D provides the quantification of the gels shown in FIG. 5C. Together, the data in FIG. 5C and FIG. 5D demonstrate a NTNN PAM for DNA cleavage by CasΦ.20, CasΦ.24 and CasΦ.25.

[0373] This example demonstrates PAM sequences that enable CasΦ polypeptides to be targeted to a target sequence.

### Example 4. CasΦ-mediated genome editing in primary cells

[0374] This example illustrates the ability of CasΦ polypeptides to mediate genome editing in primary cells, such as T cells. In this study, CasΦ.12 was delivered to human T cells. CasΦ.12 was complexed to its native crRNA comprising the spacer sequence 5′-GGGCCGAGAUGUCUCGCUCC-3′ (SEQ ID NO: 1368). Complexes were formed in a 3:1 ratio of crRNA:protein. For nucleofection, 50 pmol RNP was mixed with 320,000 cells per well and the Amaxa EH115 program was used. Immediately after nucleofection, 80 μl pre-warmed culture medium was added to each well. The cells were then left in the cuvette plate for 15 minutes before transfer to the culture plate. Genomic DNA was extracted from cells on day 3 and day 5. Flow cytometry analysis was performed on day 5. As shown in FIG. 6A, when CasΦ.12 was delivered with a gRNA targeting the endogenous beta-2 microglobulin (B2M) gene, a distinct population of B2M-negative cells was detected by flow cytometry analysis demonstrating the CasΦ.12-mediated knockout of the endogenous B2M gene. In the absence of the B2M-targeting gRNA, the population of B2M-negative cells was not observed by flow cytometry. Indels were confirmed by next generation sequencing analysis, as shown FIG. 6C, and quantified, as shown in FIG. 6B.

[0375] The inventors went on to use CasΦ.12 to target the T-cell receptor alpha-constant (TRAC) gene. Knockout of the TRAC gene prevents expression of the T cell receptor. Accordingly, TRAC knockout T cells are beneficial for T cell therapies (e.g., CAR-T cell therapies) because TRAC knockout T cells have a longer half-life in vivo as the T cells have less potential to attack the recipient's normal cells. In this study, CasΦ.12 and gRNA targeting the TRAC gene (CasPhi1 or CasPhi7) were delivered to T cells. As shown in FIG. 6D, the delivery of the CasΦ.12 and the gRNA resulted in a population of TRAC-negative cells, which were detected by flow cytometry. The inventors went on to confirm the presence of indel mutations by sequencing the target locus. As shown in FIG. 6E, the sequence analysis revealed insertion, deletion and substitution mutations at the endogenous targeted locus. The frequency of indel mutations was quantified, as shown in FIG. 6F.

[0376] These data demonstrate the utility of CasΦ polypeptides as a robust genome editing tool in primary human cells.

### Example 5. High Efficiency of CasΦ Polypeptide-Mediated Genome Editing in Primary Cells

[0377] The present example shows that CasΦ.12 mediates high genome editing efficiency that is comparable the editing efficiency mediated by Cas9. Results of the study are shown in FIG. 21. In this study, CasΦ.12 mRNA (SEQ ID NO: 57) with a gRNA (CUUUCAAGACUAAUAGAUUGCUCCUUACGAGGAGACGGGCCGAGAUGUCUCGCUC C (SEQ ID NO: 1582)); spacer sequence is bold and underlined) or Cas9 mRNA with a gRNA (GGCCGAGATGTCTCGCTCCG (SEQ ID NO: 1583)) was delivered to T cells. gRNAs used in this study targeted the B2M gene. For nucleofection, T cells were resuspended in BTXpress electroporation medium (5×10⁵ cells per well) and mixed with CasΦ.12 or Cas9 mRNA and 500 pmol gRNA. Cells were collected on day 2 for extraction of genomic DNA, and the frequency of indel mutations was determined. As shown in FIG. 7A, when 20 μg of CasΦ.12 mRNA was delivered with gRNA to T cells, high genome editing efficiency was achieved, and this was at a similar level to of genome editing achieved using Cas9. Cells were also collected on Day 2 for flow cytometry to determine the frequency of B2M knockout. As shown in FIG. 7B and quantified in FIG. 7A, a similar percentage of B2M-negative cells were detected after delivery of CasΦ.12 or Cas9 mRNA. Accordingly, this example demonstrates high efficiency of CasΦ polypeptide-mediated genome efficiency in primary cells.

### Example 6

[0378] This example illustrates the ability of CasΦ RNP complexes to target multiple genes simultaneously. In this study, gRNAs targeting B2M or TRAC were incubated with CasΦ.12 polypeptides (SEQ ID NO: 57) for 10 minutes at room temperature to form RNP complexes. RNP complexes were formed with a variety of gRNAs with different modifications (unmodified, 2′-O-methyl on the last 3′ nucleotide of the crRNA (line), 2′-O-methyl on the last two 3′ nucleotides of the crRNA (2me) and 2′-O-methyl on the last three 3′ nucleotides of the crRNA(3me)) and with different repeat and spacer sequences (20-20, which corresponds to 20 nucleotide repeat and 20 nucleotide spacer, and 20-17, which corresponds to 20 nucleotide repeat and 17 nucleotide spacer), as shown in TABLE 18. B2M targeting RNPs, TRAC targeting RNPs or B2M targeting RNPs and TRAC targeting RNPs were added to T cells. T cells were resuspended at 5×10⁵ cells/20 μL in Nucleofection P3 solution and an Amaxa 4D 96-well electroporation system with pulse code EHi115 was used to nucleofect the cells. Immediately after nucleofection, 85 l pre-warmed culture medium was added to each well. The cells were then left in the cuvette plate for 10 minutes before transfer to the culture plate. On Day 3, genomic DNA was extracted. On Day 5, cells were harvested for flow cytometry. Quantification of the percentage of B2M-negative and CD3-negative cells is shown in FIG. 8A for gRNAs with a repeat length of 20 nucleotides and a spacer length of 20 nucleotides, and in FIG. 8B for gRNAs with a repeat length of 20 nucleotides and a spacer length of 17 nucleotides. Corresponding flow cytometry panels can be seen in FIG. 8C for gRNAs of different repeat and spacer lengths and with different modifications.

[0379] In a further study, RNP complexes were formed using CasΦ.12 and modified gRNAs (unmodified, line, 2me, 3me, 2′-fluoro on the last 3′ nucleotide of the crRNA (RF), 2′-fluoro on the last two 3′ nucleotides of the crRNA (2F) and 2′-fluoro on the last three 3′ nucleotides of the crRNA (3F)) with different lengths of spacer sequences (20-20 and 20-17 as above) that target TRAC. T cells were nucleofected with RNP complexes (125 pmol) using the P3 primary cell nucleofection kit and an Amaxa 4D 96-well electroporation system with pulse code EH115. As shown in FIG. 8D, ˜90 % editing efficiency was achieved using CasΦ.12 and modified gRNAs. FIG. 8E shows a flow cytometry plot illustrating-90% TRAC knockout in T cells after delivery of CasΦ.12 and modified gRNAs. This data further demonstrates the ability of CasΦ to mediate high efficiency genome editing.

TABLE 18

| | | | Repeat | Spacer | |
|---|---|---|---|---|---|
| | | | sequence | sequence | crRNA sequence |
| Name | Target | Modification | (5′ --> 3′) | (5′ --> 3′) | (5′ --> 3′) |
| R3150 | B2M | Unmodified, 2′OMe | AUUGCUCC | CAGUGGGG | AUUGCUCCUUA |
| 20-20 | Exon 2 | at last 3′ base (1me) | UUACGAG | GUGAAUUC | CGAGGAGACCA |
| | | 2′OMe at last two | GAGAC | AGUG (SEQ | GUGGGGGUGAA |
| | | 3′ bases (2me) | (SEQ ID | ID NO: 1351) | UUCAGUG (SEQ |
| | | 2′OMe at last three | NO: 1350) | | ID NO: 1352) |
| | | 3′ bases (3me) | | | |
| R3042 | TRAC | Unmodified, | AUUGCUCC | GAGUCUCU | AUUGCUCCUUA |
| 20-20 | Exon 1 | 1me | UUACGAG | CAGCUGGU | CGAGGAGACGA |
| | | 2me | GAGAC | ACAC (SEQ | GUCUCUCAGCU |
| | | 3me | (SEQ ID | ID NO: 1353) | GGUACAC (SEQ |
| | | | NO: 1350) | | ID NO: 1354) |
| R3150 | B2M | Unmodified, | AUUGCUCC | CAGUGGGG | AUUGCUCCUUA |
| 20-17 | Exon 2 | 1me | UUACGAG | GUGAAUUC | CGAGGAGACCA |
| | | 2me | GAGAC | A (SEQ ID | GUGGGGGUGAA |
| | | 3me | (SEQ ID | NO: 1355) | UUCA (SEQ ID |
| | | | NO: 1350) | | NO: 1356) |
| R3042 | TRAC | Unmodified, | AUUGCUCC | CAGUGGGG | AUUGCUCCUUA |
| 20-17 | Exon 1 | 1me | UUACGAG | GUGAAUUC | CGAGGAGACGA |
| | | 2me | GAGAC | A (SEQ ID | GUCUCUCAGCU |
| | | 3me | (SEQ ID | NO: 1355) | GGUA (SEQ ID |
| | | | NO: 1350) | | NO: 1357) |

### Example 7. Identification of Optimal Guide RNAs for CasΦ Polypeptide-Mediated Genome Editing in Primary Cells

[0380] The present example shows identification of the best performing gRNAs that target TRAC, B32M and programmed cell death protein 1 (PD1) in T cells. In this study, CasΦ.12 polypeptides (SEQ ID NO: 57) were incubated with different gRNAs (shown in TABLE 19) at room temperature for 10 minutes to form RNP complexes. T cells were resuspended at 5×10⁵ cells/20 μL in electroporation solution (Lonza) and an Amaxa 4D Nucleofector with pulse code EH15 was used to nucleofect the cells Immediately after nucleofection, 80 d pre-warmed culture medium was added to each well. The cells were then left in the cuvette plate for 10 minutes before transfer to the culture plate. After 48 hours, DNA was extracted from half of the cells and PCR was performed to detect the frequency of indels. The rest of the cells were cultured until Day 5, and were then collected for flow cytometry to detect the frequency of TRAC or 2M knockout. FIG. 9A and FIG. 9B show exemplary gRNAs for targeting TRAC. FIG. 9C and FIG. 9D show exemplary gRNAs for targeting B32M. FIG. 9E shows exemplary gRNAs for targeting PD 1. Additionally, this example demonstrates that a guide RNAs targeting a non-coding region can mediate gene knockout. For example, R3007, R2995, R2992 and R3014 target non-coding regions of the PD1 gene. The screening for gRNAs targeting TRAC is shown in FIG. 9F and for gRNAs targeting B2M is shown in FIG. 9H. Flow cytometry plots of exemplary gRNAs targeting TRAC are shown in FIG. 9G and of exemplary gRNAs targeting B32M in FIG. 9I.

TABLE 19

| Name | Target | Spacer sequence (5′ -- > 3′) |
|---|---|---|
| R3041 | TRAC | UCCCACAGAUAUCCAGAACC (SEQ ID NO: 1358) |
| R3042 | TRAC | GAGUCUCUCAGCUGGUACAC (SEQ ID NO: 1353) |
| R3043 | TRAC | AGAGUCUCUCAGCUGGUACA (SEQ ID NO: 1359) |
| R3061 | TRAC | AAGUCCAUAGACCUCAUGUC (SEQ ID NO: 1360) |
| R3063 | TRAC | AAGAGCAACAGUGCUGUGGC (SEQ ID NO: 1361) |
| R3066 | TRAC | GUUGCUCCAGGCCACAGCAC (SEQ ID NO: 1362) |
| R3068 | TRAC | GCACAUGCAAAGUCAGAUUU (SEQ ID NO: 1363) |
| R3069 | TRAC | GCAUGUGCAAACGCCUUCAA (SEQ ID NO: 1364) |
| R3081 | TRAC | CUAAAAGGAAAAACAGACAU (SEQ ID NO: 1365) |
| R3141 | TRAC | CUCGACCAGCUUGACAUCAC (SEQ ID NO: 1366) |
| R3088 | B2M | AUAUAAGUGGAGGCGUCGCG (SEQ ID NO: 1367) |
| R3091 | B2M | GGGCCGAGAUGUCUCGCUCC (SEQ ID NO: 1368) |
| R3094 | B2M | UGGCCUGGAGGCUAUCCAGC (SEQ ID NO: 1369) |
| R3119 | B2M | AAGUUGACUUACUGAAGAAU (SEQ ID NO: 1370) |
| R3132 | B2M | AGCAAGGACUGGUCUUUCUA (SEQ ID NO: 1371) |
| R3149 | B2M | AGUGGGGGUGAAUUCAGUGU (SEQ ID NO: 1372) |
| R3150 | B2M | CAGUGGGGGUGAAUUCAGUG (SEQ ID NO: 1351) |
| R3155 | B2M | GGCUGUGACAAAGUCACAUG (SEQ ID NO: 1373) |
| R3156 | B2M | GUCACAGCCCAAGAUAGUUA (SEQ ID NO: 1374) |
| R3157 | B2M | UCACAGCCCAAGAUAGUUAA (SEQ ID NO: 1375) |
| R2946 | PD1 | UGUGACACGGAAGCGGCAGU (SEQ ID NO: 1376) |
| R2992 | PD1 | GGGGCUGGUUGGAGAUGGCC (SEQ ID NO: 1377) |
| R2995 | PD1 | GAGCAGCCAAGGUGCCCCUG (SEQ ID NO: 1378) |
| R3007 | PD1 | ACACAUGCCCAGGCAGCACC (SEQ ID NO: 1379) |
| R3014 | PD1 | AGGCCCAGCCAGCACUCUGG (SEQ ID NO: 1380) |

### Example 8. RNP and mRNA Delivery of CasΦ Polypeptides

[0381] This example illustrates that CasΦ.12 can be delivered to primary cells as mRNA or as an RNP complex. In one study, RNP complexes were formed using CasΦ.12 protein (0, 100, 200 or 400 μmol) (SEQ ID NO: 57) and gRNAs (0, 400 or 800 μmol) targeting B2M or TRAC. RNP complexes were added to T cells. T cells were nucleofected using the Amaxa P3 kit and Amaxa 4D 96-well electroporation system with pulse code EH115. Cells were harvested for flow cytometry to determine the percentage of B2M or TRAC knockout cells, and genomic DNA was extracted to detect the frequency of indel mutations. As shown in FIG. 10A, a distinct population of B2M-negative cells was detected in T cells transfected with CasΦ.12 RNP complex targeting B2M. A distinct population of TRAC-negative cells was detected in in T cells transfected with CasΦ.12 RNP complex targeting TRAC, and shown in FIG. 10B. Quantification of the percentage of B2M knockout cells is shown in FIG. 10C and quantification of the percentage of TRAC knockout cells is shown in FIG. 10D. A high frequency of indel mutations was also seen after delivery of RNP complexes. As shown in FIG. 10E, ˜55% indel mutations was detected when RNP complexes targeting B2M were formed using 400 pmol protein and 800 pmol guide RNA. A similar frequency of indel mutations was detected when RNP complexes targeting TRAC were formed using the same conditions, as illustrated in FIG. 10F.

[0382] In a second study, CasΦ.12 mRNA was delivered to T cells with a gRNA targeting the B2M gene. For nucleofection, T cells were resuspended in BTXpress electroporation medium (5×10⁵ cells per well) and mixed with CasΦ.12 mRNA and 500 pmol gRNA. Cells were collected on Day 2 for extraction of genomic DNA, and the frequency of indel mutations was determined. As shown in FIG. 10G and FIG. 10H, delivery of CasΦ.12 mRNA and gRNA resulted in a high frequency of indel mutations. This was at a comparable level to genome editing with delivery of Cas9 mRNA. Further data from this study are shown in FIG. 10I and FIG. 10J. FIG. 10I shows the frequency of indel mutations and functional knockout, as assessed by flow cytometry, of the B2M gene induced by either CasΦ.12 or Cas9 targeting the same site. FIG. 10J shows the distribution of the size of indel mutations induced by CasΦ.12 or Cas9 determined by NGS analysis. CasΦ.12 predominantly induced larger deletion mutations whereas Cas9 induced mostly small 1 bp InDels. This data further confirms the ability of CasΦ.12 to mediate genome editing at the B2M locus.

### Example 9. Multiplex Genome Editing with CasΦ Polypeptides

[0383] This example illustrates the ability of CasΦ RNP complexes to knockout multiple genes simultaneously. In this study, gRNAs targeting B2M, TRAC and PDCD1 (provided in TABLE 20) were incubated with CasΦ.12 (SEQ ID NO: 57) for 10 minutes at room temperature to form B32M, TRAC, and PDC1 targeting RNPs, respectively. The 2M targeting RNPs, TRAC targeting RNPs, PDCD1 targeting RNPs and combinations thereof were added to T cells. T cells were resuspended at 5×10⁵ cells/20 μL in Nucleofection P3 solution and an Amaxa4D 96-well electroporation system with pulse code EH115 was used to nucleofect the cells. Immediately after nucleofection, 85 d pre-warmed culture medium was added to each well. The cells were then left in the cuvette plate for 10 minutes before transfer to the culture plate. On Day 3, genomic DNA was extracted and sent for NGS sequencing and the 0 indel was measured with a positive indel being indicative of 0% knockout. On Day 5, cells were harvested for flow cytometry and the 00 knockout was measured with fluorescently labeled antibodies to TRAC and 82M (antibody to PDCD1 unavailable). % indel results are presented in TABLE 21 and flow cytometry data presented in TABLE 22. Corresponding flow cytometry panels are shown in FIG. 11.

TABLE 20

| Descrip- | SEQ | |
|---|---|---|
| tion | ID | gRNA Sequence |
| B2M gRNA | 1381 | CUUUCAAGACUAAUAGAUUGCUCCUUACGAGGAG |
| (R3132) | | ACAGCAAGGACUGGUCUUUCUA |
| TRAC gRNA | 1382 | CUUUCAAGACUAAUAGAUUGCUCCUUACGAGGAG |
| (R3042) | | ACGAGUCUCUCAGCUGGUACAC |
| PDCD1 gRNA | 1383 | CUUUCAAGACUAAUAGAUUGCUCCUUACGAGGAG |
| (R2925) | | ACUAGCACCGCCCAGACGACUG |

TABLE 21

| Description | RNP Guide ID(s) | Amplicon | % INDEL |
|---|---|---|---|
| TRAC single KO | R3042 | TRAC | 77.6% |
| B2M single KO | R3132 | B2M | 85.5% |
| PDCD1 single KO | R2925 | PDCD1 | 44.6% |
| TRAC, B2M double KO | R3132 & R3042 | TRAC | 58.8% |
| TRAC, B2M double KO | R3132 & R3042 | B2M | 61.2% |
| TRAC, B2M, PDCD1 triple KO | R3132, R3042, R2925 | TRAC | 59.2% |
| TRAC, B2M, PDCD1 triple KO | R3132, R3042, R2925 | B2M | 69.4% |
| TRAC, B2M, PDCD1 triple KO | R3132, R3042, R2925 | PDCD1 | 42.1% |

TABLE 22

| gRNA | B2M+ CD3− | B2M+, CD3+ | B2M−, CD3+ | B2M−, CD3− |
|---|---|---|---|---|
| TRAC | 94 | 5.91 | 0.00418 | 0.1 |
| B2M | 0.051 | 8.65 | 90.7 | 0.59 |
| TRAC + B2M | 4.2 | 4.89 | 4.01 | 86.9 |
| TRAC + B2M + | 4.74 | 14.1 | 4.33 | 76.8 |
| PDCD1 | | | | |

### Example 10. Adeno-Associated Virus Encoding CasΦ.12 Facilitates Genome Editing

[0384] This example shows that a CasΦ.12 plasmid, including both CasΦ polypeptide sequence and gRNA sequence, sometimes called an all-in-one, can be used to facilitate genome editing. In this study, the crRNAs (sequences shown in TABLE 23 and TABLE 24) from the initial RNP screen were chosen and truncations of these crRNAs were generated with repeat lengths of 36, 25, 20, or 19 nucleotides in combination with spacer lengths of 20, 17, or 16 nucleotides. Each crRNA was then cloned into an AAV vector consisting of U6 promoter to drive crRNA expression, intron-less EF1alpha short (EFS) promoter driving CasΦ expression, PolyA signal, and 1 kb stuffer sequence genomic. Hepal-6 mouse hepatoma cells were nucleofected with 10 μg of each AAV plasmid. After 72 hours, genomic DNA was extracted and the frequency of indel mutations was determined using NGS. FIG. 12A shows a plasmid map of the adeno-associated virus (AAV) encoding the CasΦ polypeptide sequence and gRNA sequence. FIG. 12B illustrates repeat truncations. FIG. 12C shows various truncated repeat sequences (25 nt, 20 nt and 19 nt), the data of which shown in FIGS. 12D-12G. FIG. 12D shows efficient transfection with AAV. FIG. 12E shows the frequency of CasΦ.12 induced indel mutations in Hepal-6 cells transduced with 10 μg of each AAV plasmid. gRNAs containing repeat sequences of 19, 20, 25 or 36 nucleotides and spacer sequences of 16, 17 or 20 nucleotides were used in this study. In the graph legend, repeat and spacer lengths are indicated as the number of nucleotides in the repeat followed by the number of nucleotides in the spacer, e.g. 20-17 has a repeat length of 20 nucleotides and a spacer length of 17 nucleotides. The frequency of indel mutations is comparable to that of Cas9. FIG. 12F, and FIG. 12G show the frequency of CasΦ.12 induced indel mutations with different gRNA containing repeat and spacer sequences of different lengths (indicated as in FIG. 12F with repeat length followed by spacer length). This study demonstrates that the all-in-one vector method of CasΦ.12 mediated genome editing is robust across different gRNA sequences and with gRNAs of different repeat and spacer lengths.

TABLE 23
spacer sequences of gRNAs targeting mouse PCSK9

| | | | SEQ ID |
|---|---|---|---|
| Name | Spacer sequence (5′ --> 3′) | Target | NO |
| R4238 | CCGCUGUUGCCGCCGCUGCU | PCSK9 | 1384 |
| R4239 | CCGCCGCUGCUGCUGCUGUU | PCSK9 | 1385 |
| R4240 | CUGCUACUGUGCCCCACCGG | PCSK9 | 1386 |
| R4241 | AUAAUCUCCAUCCUCGUCCU | PCSK9 | 1387 |
| R4242 | UGAAGAGCUGAUGCUCGCCC | PCSK9 | 1388 |
| R4243 | GAGCAACGGCGGAAGGUGGC | PCSK9 | 1389 |
| R4244 | CUGGCAGCCUCCAGGCCUCC | PCSK9 | 1390 |
| R4245 | UGGUGCUGAUGGAGGAGACC | PCSK9 | 1391 |
| R4246 | AAUCUGUAGCCUCUGGGUCU | PCSK9 | 1392 |
| R4247 | UUCAAUCUGUAGCCUCUGGG | PCSK9 | 1393 |
| R4248 | GUUCAAUCUGUAGCCUCUGG | PCSK9 | 1394 |
| R4249 | AACAAACUGCCCACCGCCUG | PCSK9 | 1395 |
| R4250 | AUGACAUAGCCCCGGCGGGC | PCSK9 | 1396 |
| R4251 | UACAUAUCUUUUAUGACCUC | PCSK9 | 1397 |
| R4252 | UAUGACCUCUUCCCUGGCUU | PCSK9 | 1398 |
| R4253 | AUGACCUCUUCCCUGGCUUC | PCSK9 | 1399 |
| R4254 | UGACCUCUUCCCUGGCUUCU | PCSK9 | 1400 |
| R4255 | ACCAAGAAGCCAGGGAAGAG | PCSK9 | 1401 |
| R4256 | CCUGGCUUCUUGGUGAAGAU | PCSK9 | 1402 |
| R4257 | UUGGUGAAGAUGAGCAGUGA | PCSK9 | 1403 |
| R4258 | GUGAAGAUGAGCAGUGACCU | PCSK9 | 1404 |
| R4259 | CCCCAUGUGGAGUACAUUGA | PCSK9 | 1405 |
| R4260 | CUCAAUGUACUCCACAUGGG | PCSK9 | 1406 |
| R4261 | AGGAAGACUCCUUUGUCUUC | PCSK9 | 1407 |
| R4262 | GUCUUCGCCCAGAGCAUCCC | PCSK9 | 1408 |
| R4263 | UCUUCGCCCAGAGCAUCCCA | PCSK9 | 1409 |
| R4264 | GCCCAGAGCAUCCCAUGGAA | PCSK9 | 1410 |
| R4265 | CAUGGGAUGCUCUGGGCGAA | PCSK9 | 1411 |
| R4266 | GCUCCAGGUUCCAUGGGAUG | PCSK9 | 1412 |
| R4267 | UCCCAGCAUGGCACCAGACA | PCSK9 | 1413 |
| R4268 | CUCUGUCUGGUGCCAUGCUG | PCSK9 | 1414 |
| R4269 | GAUACCAGCAUCCAGGGUGC | PCSK9 | 1415 |
| R4270 | AGGGCAGGGUCACCAUCACC | PCSK9 | 1416 |
| R4271 | AAGUCGGUGAUGGUGACCCU | PCSK9 | 1417 |
| R4272 | AACAGCGUGCCGGAGGAGGA | PCSK9 | 1418 |
| R4273 | GCCACACCAGCAUCCCGGCC | PCSK9 | 1419 |
| R4274 | AGCACACGCAGGCUGUGCAG | PCSK9 | 1420 |
| R4275 | ACAGUUGAGCACACGCAGGC | PCSK9 | 1421 |
| R4276 | CCUUGACAGUUGAGCACACG | PCSK9 | 1422 |
| R4277 | GCUGACUCUUCCGAAUAAAC | PCSK9 | 1423 |
| R4278 | AUUCGGAAGAGUCAGCUAAU | PCSK9 | 1424 |
| R4279 | UUCGGAAGAGUCAGCUAAUC | PCSK9 | 1425 |
| R4280 | GGAAGAGUCAGCUAAUCCAG | PCSK9 | 1426 |
| R4281 | UGCUGCCCCUGGCCGGUGGG | PCSK9 | 1427 |
| R4282 | AGGAUGCGGCUAUACCCACC | PCSK9 | 1428 |
| R4283 | CCAGCUGCUGCAACCAGCAC | PCSK9 | 1429 |
| R4284 | CAGCAGCUGGGAACUUCCGG | PCSK9 | 1430 |
| R4285 | CGGGACGACGCCUGCCUCUA | PCSK9 | 1431 |
| R4286 | GUGGCCCCGACUGUGAUGAC | PCSK9 | 1432 |
| R4287 | CCUUGGGGACUUUGGGGACU | PCSK9 | 1433 |
| R4288 | GUCCCCAAAGUCCCCAAGGU | PCSK9 | 1434 |
| R4289 | GGGACUUUGGGGACUAAUUU | PCSK9 | 1435 |
| R4290 | GGGGACUAAUUUUGGACGCU | PCSK9 | 1436 |
| R4291 | GGGACUAAUUUUGGACGCUG | PCSK9 | 1437 |
| R4292 | UGGACGCUGUGUGGAUCUCU | PCSK9 | 1438 |
| R4293 | GGACGCUGUGUGGAUCUCUU | PCSK9 | 1439 |
| R4294 | GACGCUGUGUGGAUCUCUUU | PCSK9 | 1440 |
| R4295 | CCGGGGGCAAAGAGAUCCAC | PCSK9 | 1441 |
| R4296 | GCCCCCGGGAAGGACAUCAU | PCSK9 | 1442 |
| R4297 | CCCCCGGGAAGGACAUCAUC | PCSK9 | 1443 |
| R4298 | AUGUCACAGAGUGGGACCUC | PCSK9 | 1444 |
| R4299 | UGGCUCGGAUGCUGAGCCGG | PCSK9 | 1445 |
| R4300 | CCCUGGCCGAGCUGCGGCAG | PCSK9 | 1446 |
| R4301 | GUAGAGAAGUGGAUCAGCCU | PCSK9 | 1447 |
| R4302 | GGUAGAGAAGUGGAUCAGCC | PCSK9 | 1448 |
| R4303 | UCUACCAAAGACGUCAUCAA | PCSK9 | 1449 |
| R4304 | AUGACGUCUUUGGUAGAGAA | PCSK9 | 1450 |
| R4305 | CCUGAGGACCAGCAGGUGCU | PCSK9 | 1451 |
| R4306 | GGGGUCAGCACCUGCUGGUC | PCSK9 | 1452 |
| R4307 | GAGUGGGCCCCGAGUGUGCC | PCSK9 | 1453 |
| R4308 | UGGGGCACAGCGGGCUGUAG | PCSK9 | 1454 |
| R4309 | UCCAGGAGCGGGAGGCGUCG | PCSK9 | 1455 |
| R4310 | CAGACCUGCUGGCCUCCUAU | PCSK9 | 1456 |
| R4311 | AGGGCCUUGCAGACCUGCUG | PCSK9 | 1457 |
| R4312 | GGGGGUGAGGGUGUCUAUGC | PCSK9 | 1458 |
| R4313 | GGGGUGAGGGUGUCUAUGCC | PCSK9 | 1459 |
| R4314 | GCACGGGGAACCAGGCAGCA | PCSK9 | 1460 |
| R4315 | CCCGUGCCAACUGCAGCAUC | PCSK9 | 1461 |
| R4316 | UGGAUGCUGCAGUUGGCACG | PCSK9 | 1462 |
| R4317 | UGGUGGCAGUGGACAUGGGU | PCSK9 | 1463 |
| R4318 | CACUUCCCAAUGGAAGCUGC | PCSK9 | 1464 |
| R4319 | CAUUGGGAAGUGGAAGACCU | PCSK9 | 1465 |
| R4320 | GGAAGUGGAAGACCUUAGUG | PCSK9 | 1466 |
| R4321 | GUGUCCGGAGGCAGCCUGCG | PCSK9 | 1467 |
| R4322 | GCCACCAGGCGGCCAGUGUC | PCSK9 | 1468 |
| R4323 | CUGCUGCCAUGCCCCAGGGC | PCSK9 | 1469 |
| R4324 | CAGCCCUGGGGCAUGGCAGC | PCSK9 | 1470 |
| R4325 | CAUUCCAGCCCUGGGGCAUG | PCSK9 | 1471 |
| R4326 | GCAUUCCAGCCCUGGGGCAU | PCSK9 | 1472 |
| R4327 | UGCAUUCCAGCCCUGGGGCA | PCSK9 | 1473 |
| R4328 | AUUUUGCAUUCCAGCCCUGG | PCSK9 | 1474 |
| R4329 | CAUCCAGUCAGGGUCCAUCC | PCSK9 | 1475 |
| R4330 | UCCACGCUGUAGGCUCCCAG | PCSK9 | 1476 |
| R4331 | CCACACACAGGUUGUCCACG | PCSK9 | 1477 |
| R4332 | UCCACUGGUCCUGUCUGCUC | PCSK9 | 1478 |
| R4333 | CUGAAGGCCGGCUCCGGCAG | PCSK9 | 1479 |

TABLE 24
CasΦ.12 gRNAs targeting mouse PCSK9

| | Repeat + spacer sequence RNA | SEQ ID |
|---|---|---|
| Name | Sequence (5' --> 3') | NO |
| R4238_CasPhi12 | CUUUCAAGACUAAUAGAUUGCUCCUUACGAGGAGA | 1480 |
| | CCCGCUGUUGCCGCCGCUGCU | |
| R4239_CasPhi12 | CUUUCAAGACUAAUAGAUUGCUCCUUACGAGGAGA | 1481 |
| | CCCGCCGCUGCUGCUGCUGUU | |
| R4240_CasPhi12 | CUUUCAAGACUAAUAGAUUGCUCCUUACGAGGAGA | 1482 |
| | CCUGCUACUGUGCCCCACCGG | |
| R4241_CasPhi12 | CUUUCAAGACUAAUAGAUUGCUCCUUACGAGGAGA | 1483 |
| | CAUAAUCUCCAUCCUCGUCCU | |
| R4242_CasPhi12 | CUUUCAAGACUAAUAGAUUGCUCCUUACGAGGAGA | 1484 |
| | CUGAAGAGCUGAUGCUCGCCC | |
| R4243_CasPhi12 | CUUUCAAGACUAAUAGAUUGCUCCUUACGAGGAGA | 1485 |
| | CGAGCAACGGCGGAAGGUGGC | |
| R4244_CasPhi12 | CUUUCAAGACUAAUAGAUUGCUCCUUACGAGGAGA | 1486 |
| | CCUGGCAGCCUCCAGGCCUCC | |
| R4245_CasPhi12 | CUUUCAAGACUAAUAGAUUGCUCCUUACGAGGAGA | 1487 |
| | CUGGUGCUGAUGGAGGAGACC | |
| R4246_CasPhi12 | CUUUCAAGACUAAUAGAUUGCUCCUUACGAGGAGA | 1488 |
| | CAAUCUGUAGCCUCUGGGUCU | |
| R4247_CasPhi12 | CUUUCAAGACUAAUAGAUUGCUCCUUACGAGGAGA | 1489 |
| | CUUCAAUCUGUAGCCUCUGGG | |
| R4248_CasPhi12 | CUUUCAAGACUAAUAGAUUGCUCCUUACGAGGAGA | 1490 |
| | CGUUCAAUCUGUAGCCUCUGG | |
| R4249_CasPhi12 | CUUUCAAGACUAAUAGAUUGCUCCUUACGAGGAGA | 1491 |
| | CAACAAACUGCCCACCGCCUG | |
| R4250_CasPhi12 | CUUUCAAGACUAAUAGAUUGCUCCUUACGAGGAGA | 1492 |
| | CAUGACAUAGCCCCGGCGGGC | |
| R4251_CasPhi12 | CUUUCAAGACUAAUAGAUUGCUCCUUACGAGGAGA | 1493 |
| | CUACAUAUCUUUUAUGACCUC | |
| R4252_CasPhi12 | CUUUCAAGACUAAUAGAUUGCUCCUUACGAGGAGA | 1494 |
| | CUAUGACCUCUUCCCUGGCUU | |
| R4253_CasPhi12 | CUUUCAAGACUAAUAGAUUGCUCCUUACGAGGAGA | 1495 |
| | CAUGACCUCUUCCCUGGCUUC | |
| R4254_CasPhi12 | CUUUCAAGACUAAUAGAUUGCUCCUUACGAGGAGA | 1496 |
| | CUGACCUCUUCCCUGGCUUCU | |
| R4255_CasPhi12 | CUUUCAAGACUAAUAGAUUGCUCCUUACGAGGAGA | 1497 |
| | CACCAAGAAGCCAGGGAAGAG | |
| R4256_CasPhi12 | CUUUCAAGACUAAUAGAUUGCUCCUUACGAGGAGA | 1498 |
| | CCCUGGCUUCUUGGUGAAGAU | |
| R4257_CasPhi12 | CUUUCAAGACUAAUAGAUUGCUCCUUACGAGGAGA | 1499 |
| | CUUGGUGAAGAUGAGCAGUGA | |
| R4258_CasPhi12 | CUUUCAAGACUAAUAGAUUGCUCCUUACGAGGAGA | 1500 |
| | CGUGAAGAUGAGCAGUGACCU | |
| R4259_CasPhi12 | CUUUCAAGACUAAUAGAUUGCUCCUUACGAGGAGA | 1501 |
| | CCCCCAUGUGGAGUACAUUGA | |
| R4260_CasPhi12 | CUUUCAAGACUAAUAGAUUGCUCCUUACGAGGAGA | 1502 |
| | CCUCAAUGUACUCCACAUGGG | |
| R4261_CasPhi12 | CUUUCAAGACUAAUAGAUUGCUCCUUACGAGGAGA | 1503 |
| | CAGGAAGACUCCUUUGUCUUC | |
| R4262_CasPhi12 | CUUUCAAGACUAAUAGAUUGCUCCUUACGAGGAGA | 1504 |
| | CGUCUUCGCCCAGAGCAUCCC | |
| R4263_CasPhi12 | CUUUCAAGACUAAUAGAUUGCUCCUUACGAGGAGA | 1505 |
| | CUCUUCGCCCAGAGCAUCCCA | |
| R4264_CasPhi12 | CUUUCAAGACUAAUAGAUUGCUCCUUACGAGGAGA | 1506 |
| | CGCCCAGAGCAUCCCAUGGAA | |
| R4265_CasPhi12 | CUUUCAAGACUAAUAGAUUGCUCCUUACGAGGAGA | 1507 |
| | CCAUGGGAUGCUCUGGGCGAA | |
| R4266_CasPhi12 | CUUUCAAGACUAAUAGAUUGCUCCUUACGAGGAGA | 1508 |
| | CGCUCCAGGUUCCAUGGGAUG | |
| R4267_CasPhi12 | CUUUCAAGACUAAUAGAUUGCUCCUUACGAGGAGA | 1509 |
| | CUCCCAGCAUGGCACCAGACA | |
| R4268_CasPhi12 | CUUUCAAGACUAAUAGAUUGCUCCUUACGAGGAGA | 1510 |
| | CCUCUGUCUGGUGCCAUGCUG | |
| R4269_CasPhi12 | CUUUCAAGACUAAUAGAUUGCUCCUUACGAGGAGA | 1511 |
| | CGAUACCAGCAUCCAGGGUGC | |
| R4270_CasPhi12 | CUUUCAAGACUAAUAGAUUGCUCCUUACGAGGAGA | 1512 |
| | CAGGGCAGGGUCACCAUCACC | |
| R4271_CasPhi12 | CUUUCAAGACUAAUAGAUUGCUCCUUACGAGGAGA | 1513 |
| | CAAGUCGGUGAUGGUGACCCU | |
| R4272_CasPhi12 | CUUUCAAGACUAAUAGAUUGCUCCUUACGAGGAGA | 1514 |
| | CAACAGCGUGCCGGAGGAGGA | |
| R4273_CasPhi12 | CUUUCAAGACUAAUAGAUUGCUCCUUACGAGGAGA | 1515 |
| | CGCCACACCAGCAUCCCGGCC | |
| R4274_CasPhi12 | CUUUCAAGACUAAUAGAUUGCUCCUUACGAGGAGA | 1516 |
| | CAGCACACGCAGGCUGUGCAG | |
| R4275_CasPhi12 | CUUUCAAGACUAAUAGAUUGCUCCUUACGAGGAGA | 1517 |
| | CACAGUUGAGCACACGCAGGC | |
| R4276_CasPhi12 | CUUUCAAGACUAAUAGAUUGCUCCUUACGAGGAGA | 1518 |
| | CCCUUGACAGUUGAGCACACG | |
| R4277_CasPhi12 | CUUUCAAGACUAAUAGAUUGCUCCUUACGAGGAGA | 1519 |
| | CGCUGACUCUUCCGAAUAAAC | |
| R4278_CasPhi12 | CUUUCAAGACUAAUAGAUUGCUCCUUACGAGGAGA | 1520 |
| | CAUUCGGAAGAGUCAGCUAAU | |
| R4279_CasPhi12 | CUUUCAAGACUAAUAGAUUGCUCCUUACGAGGAGA | 1521 |
| | CUUCGGAAGAGUCAGCUAAUC | |
| R4280_CasPhi12 | CUUUCAAGACUAAUAGAUUGCUCCUUACGAGGAGA | 1522 |
| | CGGAAGAGUCAGCUAAUCCAG | |
| R4281_CasPhi12 | CUUUCAAGACUAAUAGAUUGCUCCUUACGAGGAGA | 1523 |
| | CUGCUGCCCCUGGCCGGUGGG | |
| R4282_CasPhi12 | CUUUCAAGACUAAUAGAUUGCUCCUUACGAGGAGA | 1524 |
| | CAGGAUGCGGCUAUACCCACC | |
| R4283_CasPhi12 | CUUUCAAGACUAAUAGAUUGCUCCUUACGAGGAGA | 1525 |
| | CCCAGCUGCUGCAACCAGCAC | |
| R4284_CasPhi12 | CUUUCAAGACUAAUAGAUUGCUCCUUACGAGGAGA | 1526 |
| | CCAGCAGCUGGGAACUUCCGG | |
| R4285_CasPhi12 | CUUUCAAGACUAAUAGAUUGCUCCUUACGAGGAGA | 1527 |
| | CCGGGACGACGCCUGCCUCUA | |
| R4286_CasPhi12 | CUUUCAAGACUAAUAGAUUGCUCCUUACGAGGAGA | 1528 |
| | CGUGGCCCCGACUGUGAUGAC | |
| R4287_CasPhi12 | CUUUCAAGACUAAUAGAUUGCUCCUUACGAGGAGA | 1529 |
| | CCCUUGGGGACUUUGGGGACU | |
| R4288_CasPhi12 | CUUUCAAGACUAAUAGAUUGCUCCUUACGAGGAGA | 1530 |
| | CGUCCCCAAAGUCCCCAAGGU | |
| R4289_CasPhi12 | CUUUCAAGACUAAUAGAUUGCUCCUUACGAGGAGA | 1531 |
| | CGGGACUUUGGGGACUAAUUU | |
| R4290_CasPhi12 | CUUUCAAGACUAAUAGAUUGCUCCUUACGAGGAGA | 1532 |
| | CGGGGACUAAUUUUGGACGCU | |
| R4291_CasPhi12 | CUUUCAAGACUAAUAGAUUGCUCCUUACGAGGAGA | 1533 |
| | CGGGACUAAUUUUGGACGCUG | |
| R4292_CasPhi12 | CUUUCAAGACUAAUAGAUUGCUCCUUACGAGGAGA | 1534 |
| | CUGGACGCUGUGUGGAUCUCU | |
| R4293_CasPhi12 | CUUUCAAGACUAAUAGAUUGCUCCUUACGAGGAGA | 1535 |
| | CGGACGCUGUGUGGAUCUCUU | |
| R4294_CasPhi12 | CUUUCAAGACUAAUAGAUUGCUCCUUACGAGGAGA | 1536 |
| | CGACGCUGUGUGGAUCUCUUU | |
| R4295_CasPhi12 | CUUUCAAGACUAAUAGAUUGCUCCUUACGAGGAGA | 1537 |
| | CCCGGGGGCAAAGAGAUCCAC | |
| R4296_CasPhi12 | CUUUCAAGACUAAUAGAUUGCUCCUUACGAGGAGA | 1538 |
| | CGCCCCCGGGAAGGACAUCAU | |
| R4297_CasPhi12 | CUUUCAAGACUAAUAGAUUGCUCCUUACGAGGAGA | 1539 |
| | CCCCCCGGGAAGGACAUCAUC | |
| R4298_CasPhi12 | CUUUCAAGACUAAUAGAUUGCUCCUUACGAGGAGA | 1540 |
| | CAUGUCACAGAGUGGGACCUC | |
| R4299_CasPhi12 | CUUUCAAGACUAAUAGAUUGCUCCUUACGAGGAGA | 1541 |
| | CUGGCUCGGAUGCUGAGCCGG | |
| R4300_CasPhi12 | CUUUCAAGACUAAUAGAUUGCUCCUUACGAGGAGA | 1542 |
| | CCCCUGGCCGAGCUGCGGCAG | |
| R4301_CasPhi12 | CUUUCAAGACUAAUAGAUUGCUCCUUACGAGGAGA | 1543 |
| | CGUAGAGAAGUGGAUCAGCCU | |
| R4302_CasPhi12 | CUUUCAAGACUAAUAGAUUGCUCCUUACGAGGAGA | 1544 |
| | CGGUAGAGAAGUGGAUCAGCC | |
| R4303_CasPhi12 | CUUUCAAGACUAAUAGAUUGCUCCUUACGAGGAGA | 1545 |
| | CUCUACCAAAGACGUCAUCAA | |
| R4304_CasPhi12 | CUUUCAAGACUAAUAGAUUGCUCCUUACGAGGAGA | 1546 |
| | CAUGACGUCUUUGGUAGAGAA | |
| R4305_CasPhi12 | CUUUCAAGACUAAUAGAUUGCUCCUUACGAGGAGA | 1547 |
| | CCCUGAGGACCAGCAGGUGCU | |
| R4306_CasPhi12 | CUUUCAAGACUAAUAGAUUGCUCCUUACGAGGAGA | 1548 |
| | CGGGGUCAGCACCUGCUGGUC | |
| R4307_CasPhi12 | CUUUCAAGACUAAUAGAUUGCUCCUUACGAGGAGA | 1549 |
| | CGAGUGGGCCCCGAGUGUGCC | |
| R4308_CasPhi12 | CUUUCAAGACUAAUAGAUUGCUCCUUACGAGGAGA | 1550 |
| | CUGGGGCACAGCGGGCUGUAG | |
| R4309_CasPhi12 | CUUUCAAGACUAAUAGAUUGCUCCUUACGAGGAGA | 1551 |
| | CUCCAGGAGCGGGAGGCGUCG | |
| R4310_CasPhi12 | CUUUCAAGACUAAUAGAUUGCUCCUUACGAGGAGA | 1552 |
| | CCAGACCUGCUGGCCUCCUAU | |
| R4311_CasPhi12 | CUUUCAAGACUAAUAGAUUGCUCCUUACGAGGAGA | 1553 |
| | CAGGGCCUUGCAGACCUGCUG | |
| R4312_CasPhi12 | CUUUCAAGACUAAUAGAUUGCUCCUUACGAGGAGA | 1554 |
| | CGGGGGUGAGGGUGUCUAUGC | |
| R4313_CasPhi12 | CUUUCAAGACUAAUAGAUUGCUCCUUACGAGGAGA | 1555 |
| | CGGGGUGAGGGUGUCUAUGCC | |
| R4314_CasPhi12 | CUUUCAAGACUAAUAGAUUGCUCCUUACGAGGAGA | 1556 |
| | CGCACGGGGAACCAGGCAGCA | |
| R4315_CasPhi12 | CUUUCAAGACUAAUAGAUUGCUCCUUACGAGGAGA | 1557 |
| | CCCCGUGCCAACUGCAGCAUC | |
| R4316_CasPhi12 | CUUUCAAGACUAAUAGAUUGCUCCUUACGAGGAGA | 1558 |
| | CUGGAUGCUGCAGUUGGCACG | |
| R4317_CasPhi12 | CUUUCAAGACUAAUAGAUUGCUCCUUACGAGGAGA | 1559 |
| | CUGGUGGCAGUGGACAUGGGU | |
| R4318_CasPhi12 | CUUUCAAGACUAAUAGAUUGCUCCUUACGAGGAGA | 1560 |
| | CCACUUCCCAAUGGAAGCUGC | |
| R4319_CasPhi12 | CUUUCAAGACUAAUAGAUUGCUCCUUACGAGGAGA | 1561 |
| | CCAUUGGGAAGUGGAAGACCU | |
| R4320_CasPhi12 | CUUUCAAGACUAAUAGAUUGCUCCUUACGAGGAGA | 1562 |
| | CGGAAGUGGAAGACCUUAGUG | |
| R4321_CasPhi12 | CUUUCAAGACUAAUAGAUUGCUCCUUACGAGGAGA | 1563 |
| | CGUGUCCGGAGGCAGCCUGCG | |
| R4322_CasPhi12 | CUUUCAAGACUAAUAGAUUGCUCCUUACGAGGAGA | 1564 |
| | CGCCACCAGGCGGCCAGUGUC | |
| R4323_CasPhi12 | CUUUCAAGACUAAUAGAUUGCUCCUUACGAGGAGA | 1565 |
| | CCUGCUGCCAUGCCCCAGGGC | |
| R4324_CasPhi12 | CUUUCAAGACUAAUAGAUUGCUCCUUACGAGGAGA | 1566 |
| | CCAGCCCUGGGGCAUGGCAGC | |
| R4325_CasPhi12 | CUUUCAAGACUAAUAGAUUGCUCCUUACGAGGAGA | 1567 |
| | CCAUUCCAGCCCUGGGGCAUG | |
| R4326_CasPhi12 | CUUUCAAGACUAAUAGAUUGCUCCUUACGAGGAGA | 1568 |
| | CGCAUUCCAGCCCUGGGGCAU | |
| R4327_CasPhi12 | CUUUCAAGACUAAUAGAUUGCUCCUUACGAGGAGA | 1569 |
| | CUGCAUUCCAGCCCUGGGGCA | |
| R4328_CasPhi12 | CUUUCAAGACUAAUAGAUUGCUCCUUACGAGGAGA | 1570 |
| | CAUUUUGCAUUCCAGCCCUGG | |
| R4329_CasPhi12 | CUUUCAAGACUAAUAGAUUGCUCCUUACGAGGAGA | 1571 |
| | CCAUCCAGUCAGGGUCCAUCC | |
| R4330_CasPhi12 | CUUUCAAGACUAAUAGAUUGCUCCUUACGAGGAGA | 1572 |
| | CUCCACGCUGUAGGCUCCCAG | |
| R4331_CasPhi12 | CUUUCAAGACUAAUAGAUUGCUCCUUACGAGGAGA | 1573 |
| | CCCACACACAGGUUGUCCACG | |
| R4332_CasPhi12 | CUUUCAAGACUAAUAGAUUGCUCCUUACGAGGAGA | 1574 |
| | CUCCACUGGUCCUGUCUGCUC | |
| R4333_CasPhi12 | CUUUCAAGACUAAUAGAUUGCUCCUUACGAGGAGA | 1575 |
| | CCUGAAGGCCGGCUCCGGCAG | |

### Example 11. Optimization of Lipid Nanoparticle Delivery of CasΦ

[0385] This example describes the optimization of lipid nanoparticle (LNP) delivery of CasΦ mRNA and gRNA. In this study, the encapsulation efficiency of LNPs was optimized by testing different amine group to phosphate group ratio (N/P) of LNPs containing CasΦ mRNA and gRNA. An LNP kit from Precision Nanosystems (GenVoy-ILM™) was used to generate LNPs with different N/P ratios. LNPs were then dropped into HEK293T cells. Genomic DNA was extracted and the frequency of indel mutations was determined using NGS. The gRNA used in this study was R2470 with 2′O-methyl on the first three 5′ and last three 3′ nucleotides and phosphorothioate bonds in between the first three 5′ nucleotides and in between the last two 3′ nucleotides. The mRNA was generated using T7 messenger mRNA IVT kit. As shown in FIG. 13, indel mutations were detected following the use of a range of N/P ratios.

[0386] LNPs are one of the most clinically advanced non-viral delivery systems for gene therapy. LNPs have many properties that make them ideal candidates for delivery of nucleic acids, including ease of manufacture, low cytotoxicity and immunogenicity, high effiency of nucleic acid encapsulation and cell transfection, multidosing capabilities and flexibility of design (Kulkami et al., (2018) Nucleic Acid Therapeutics).

### Example 12. Genome Editing with CasΦ Polypeptides Mediates Efficient Editing of CIITA Locus

[0387] This example demonstrates CasΦ-mediated genome editing of the CIITA locus. In this study, RNP complexes were formed using CasΦ polypeptides and gRNAs targeting CIITA (sequences shown in TABLE 7 and TABLE 8). K562 cells were nucleofected with RNP complexes (250 μmol) using Lonza nucleofection protocols. Cells were harvested after 48 hours, genomic DNA was isolated and the frequency of indel mutations was evaluated using NGS analysis (MiSeq, Illumina). As shown in FIG. 14, effective genome editing of the CIITA locus was achieved using CasΦ RNP complexes.

### Example 13. PAM Screening for Effector Proteins

[0388] Effector proteins and guide RNA combinations represented in TABLE 27 were screened by in vitro enrichment (IVE) for PAM recognition. TABLE 27 shows the components of each effector protein-guide RNA complex assayed for PAM recognition. The amino acid sequences of the effector protein names in the second column of the TABLE are shown in TABLE 1 herein. The nucleotide sequences of the guide components in the third through sixth columns of the TABLE are shown in TABLE 25 and TABLE 26 herein. For example, as shown in TABLE 25, an effector protein comprising an amino acid sequence of SEQ ID NO: 1 complexed with a guide comprising a crRNA of SEQ ID NO: 347 and a tracrRNA of SEQ ID NO: 385 was screened for PAM recognition. Briefly, effector proteins were complexed with corresponding guide RNAs for 15 minutes at 37° C. The complexes were added to an IVE reaction mix. PAM screening reactions used 10 μl of RNP in 100 μl reactions with 1,000 ng of a 5′ PAM library in 1× Cutsmart buffer and were carried out for 15 minutes at 25° C., 45 minutes at 37° C. and 15 minutes at 45° C. Reactions were terminated with 1 μl of proteinase K and 5 μl of 500 mM EDTA for 30 minutes at 37° C. Next generation sequencing was performed on cut sequences to identify enriched PAMs. As shown in TABLE 27, cis cleavages were observed with RNP complexes comprising effector proteins and corresponding guide RNAs.

TABLE 25
Exemplary crRNA and tracRNA for CasM Effector Proteins

| Comp. | | | |
|---|---|---|---|
| No. | Protein | crRNA (repeat) | tracrRNA |
| 1 | CasM.298706 | CGUUGCAGCUCGCAC | GGGGCGUCUUCCCGUCCCUAAA |
| | (SEQ ID NO: | GUUGGCACUGGUUGA | UCGAGAUAGCAGCCAUUUUUCU |
| | 1) | AGGUAUUAAAUACUC | UCAUUUUUGAAGACGGUCUUGC |
| | | GUAUUGCU (SEQ ID | ACUCGAAAAGGUCAAG (SEQ ID |
| | | NO: 347) | NO: 385) |
| 2 | CasM.280604 | GUUGCAACUCACGCG | GGGGCGACUUCCCGCCCCAAAA |
| | (SEQ ID NO: | CGUAUGUGGCUUGAA | UCGAGAAAGUGACUGUCAGACU |
| | 2) | GGUAUUAAAUACUCG | UUGCUAUGCAAAGCAAGUAAUA |
| | | UAUUGCU (SEQ ID NO: | CACUCGAGAAGGUAAAGA (SEQ |
| | | 348) | ID NO: 386) |
| 3 | CasM.281060 | GUUGCAAUUCAUAUC | AGGGCGACUUCCCGUCCUAAAA |
| | (SEQ ID NO: | UCCGGGUGGAUUGAA | UCGAGAAAGUGACAAUUCAGUC |
| | 3) | GGUAUUAAAUACUCG | UCGCAUUUCGAGCAUUGUAAUA |
| | | UAUUGCU (SEQ ID NO: | CACUCGAAAAGGUUAAG (SEQ |
| | | 349) | ID NO: 387) |
| 4 | CasM.284933 | GUUGCAGCGUGCGCG | GGGGCGACUUCCCGUCCCAAAA |
| | (SEQ ID NO: | AGCGUGUGGCUUGAA | UCGAGAAAGUGGUCGUAAGUCU |
| | 4) | GGUAUUAAAUACUCG | CGAUCGGAUCGAAGCAGACAAU |
| | | UAUUGCU (SEQ ID NO: | ACACUCGAAAAGGUUAAGU |
| | | 350) | (SEQ ID NO: 388) |
| 5 | CasM.287908 | GUUGCAACUCGCACG | GGGGCGACUUCCCGUCCCUAAA |
| | (SEQ ID NO: | UGAAUGCGACUUGAA | UCGAGAAAGUGGCGGUAAGACU |
| | 5) | GGUAUUAAAUACUCG | UCGGUCUUCGAAGCGCGCAAUA |
| | | UAUUGCU (SEQ ID NO: | CACUCGAAAAGGUUAA (SEQ ID |
| | | 351) | NO: 389) |
| 6 | CasM.288518 | GAUGCAACUCGUGUG | GGGGCGACUUCCCGUCCCAAAA |
| | (SEQ ID NO: | UAUGUGCGAGUUGAA | UCGAGAAAGUGACAGUAAUUCU |
| | 6) | GGUAUUAAAUACUCG | UUGUUUUACAGAGGUUGUAAU |
| | | UAUUGCU (SEQ ID NO: | ACACUCGAUAAGGUUAAG (SEQ |
| | | 352) | ID NO: 390) |
| 7 | CasM.293891 | GACGCAACUCGCGCG | GGGGCGACCUCCCGUCCCAAAA |
| | (SEQ ID NO: | CGGGCAUGUAUUGAG | UCGAGAAAGUGGCCGUCAGACU |
| | 7) | GGUAUUAAAUACUCG | UCUCGCUGAGAAGCACGCAAUA |
| | | UAUUGCU (SEQ ID NO: | CACUCGAAAAGGUAAAG (SEQ |
| | | 353) | ID NO: 391) |
| 8 | CasM.294270 | GAUGCAUCUGACACA | AGGGCGACUUCCCGUCCUGAAA |
| | (SEQ ID NO: | GCUGGGUGAGUUGAA | UCGAGAAAGUGACAAGGAAAGC |
| | 8) | GGUAUUAAAUACUCG | GCAAUUUUGCGCCGUUGUAAUA |
| | | UAUUGCU (SEQ ID NO: | CACUCGAGAAGGUCAAG (SEQ |
| | | 354) | ID NO: 392) |
| 9 | CasM.294491 | GUUGCAACACAUGUA | AGGGCGACUUCCCGUCCUAAAA |
| | (SEQ ID NO: | UGUGGGUGAGUUGAA | UCGAGAUAGUGACAAGUCAGUC |
| | 9) | GGUAUUAAAUACUCG | UCUUAUGAGGAGCAUUGUAAUA |
| | | UAUUGCU (SEQ ID NO: | CACUCGAGAAGGUCAAG (SEQ |
| | | 355) | ID NO: 393) |
| 10 | CasM.295047 | GUUGCAGCGUGCGCG | GGGGCGACUUCCCGUCCCAAAA |
| | (SEQ ID NO: | AGCGUGUGGCUUGAA | UCGAGAAAGUGGUCGUAAGUCU |
| | 10) | GGUAUUAAAUACUCG | CGAUCGGAUCGAAGCAGACAAU |
| | | UAUUGCU (SEQ ID NO: | ACACUCGAAAAGGUUAAGU |
| | | 350) | (SEQ ID NO: 388) |
| 11 | CasM.299588 | GUUGCAAUUUGUAUA | AGGGCGACUUCACGUCCUCAAA |
| | (SEQ ID NO: | CGAGUGUGACUUGAA | UCGAGAAAGUGAGCGUAAGACU |
| | 11) | GGUAUUAAAUACUCG | UGGCUUCUGUCAAGCGGUUAAU |
| | | UAUUGCU (SEQ ID NO: | ACACUCGAGAAGGUUAA (SEQ |
| | | 356) | ID NO: 394) |
| 12 | CasM.277328 | GCUGCAACACGCGCG | GGGGCGACUUCCCGUCCCGAAA |
| | (SEQ ID NO: | GGUACGCGGGUUGAA | UCGAGAAAGUGACCGUCAGACU |
| | 12) | GGUAUUAAAUACUCG | CUGCUUUGCAGAGCAGGUAAUA |
| | | UAUUGCU (SEQ ID NO: | CACUCGAGAAGGUAAAG (SEQ |
| | | 357) | ID NO: 395) |
| 13 | CasM.297894 | GUUGCAACUCGCACG | GGGGCGUCUUCCCGUCCCUAAA |
| | (SEQ ID NO: | UUGGCACUGAUUGAA | UCGAGAUAGCAGCCAUUUUUCU |
| | 13) | GGUAUUAAAUACUCG | UCAUUUUUUGAAGACGGUCUUG |
| | | UAUUGCU (SEQ ID NO: | CACUCGAAAAGGUCAAG (SEQ |
| | | 358) | ID NO: 396) |
| 14 | CasM.291449 | GCUGUAGCCCUGCUC | CACGCTAGCTGAAAAGCAACCG |
| | (SEQ ID NO: | AAAUUGUAGGGCGCA | CGTACACGCGGACGAACGGCCG |
| | 14) | UGCAGGUAUUAAAUA | ACCTGCTCGGCCTGAAGGTTGAG |
| | | CUCGUAUUGCU (SEQ | AAGGTTATGTATAAGAGGAGAA |
| | | ID NO: 359) | AATCCCCCTTCATAATCGCTCAC |
| | | | CAAGCTCCCAATTTACATATTTT |
| | | | (SEQ ID NO: 397) |
| 15 | CasM.291449 | GCUGUAGCCCUGCUC | CGGCCGACCUGCUCGGCCUGAA |
| | (SEQ ID NO: | AAAUUGUAGGGCGCA | GGUUGAGAAGGUUAUGUAUAA |
| | 14) | UGCAGGUAUUAAAUA | GAGGAGAAAAUCCCCCUUCAUA |
| | | CUCGUAUUGCU (SEQ | AUCGCUCACCAAGCUCCCAAUU |
| | | ID NO: 359) | UACAUAUUUU (SEQ ID NO: 398) |
| 16 | CasM.297599 | GUUGUAGUCGACCUG | TATTGCGCTAGCCATAATGGCAA |
| | (SEQ ID NO: | AAUCUGUGGGGUGCU | TCGCGTACAGGCAACTGAAGGC |
| | 15) | UACAGGUAUUAAAUA | CGACCTGTACGGCCTTAAGGTTG |
| | | CUCGUAUUGCU (SEQ | AGAAGGCACATGTAAGTGGAAA |
| | | ID NO: 360) | AATGCTTTCCCGTTGTGTTCGCT |
| | | | CACCAAGCACACACGTTTTTTT |
| | | | (SEQ ID NO: 399) |
| 17 | CasM.297599 | GUUGUAGUCGACCUG | GAAGGCCGACCUGUACGGCCUU |
| | (SEQ ID NO: | AAUCUGUGGGGUGCU | AAGGUUGAGAAGGCACAUGUAA |
| | 15) | UACAGGUAUUAAAUA | GUGGAAAAAUGCUUUCCCGUUG |
| | | CUCGUAUUGCU (SEQ | UGUUCGCUCACCAAGCACACAC |
| | | ID NO: 360) | GUUUUUUU (SEQ ID NO: 400) |
| 18 | CasM.286588 | GGUGUAUGUAACCGC | AGGTCGCCGTTTACGTTGCGTCA |
| | (SEQ ID NO: | AAUUUGAAGGGUGCA | CAAGGGCGCGCGGGCGACCGAA |
| | 16) | UACAGGUAUUAAAUA | GGCCGATCTGTACGGCCTGCAGG |
| | | CUCGUAUUGCU (SEQ | TTGAGAAGGCACATATTAGAGG |
| | | ID NO: 361) | AAAATTGCTTCCCTTTGTGTTCG |
| | | | CTCACCGAGTATTCCTTGTTTTTT |
| | | | (SEQ ID NO: 401) |
| 19 | CasM.286588 | GGUGUAUGUAACCGC | AUCUGUACGGCCUGCAGGUUGA |
| | (SEQ ID NO: | AAUUUGAAGGGUGCA | GAAGGCACAUAUUAGAGGAAAA |
| | 16) | UACAGGUAUUAAAUA | UUGCUUCCCUUUGUGUUCGCUC |
| | | CUCGUAUUGCU (SEQ | ACCGAGUAUUCCUUGUUUUUU |
| | | ID NO: 361) | (SEQ ID NO: 402) |
| 20 | CasM.286910 | GUUGGAAUCGACCUU | CAATGTTTCGCTAACCTTTAAGG |
| | (SEQ ID NO: | AAUUUGAGGUGUGCU | TAATCGCGGGCAGGCGACTGAA |
| | 17) | UACAGGUAUUAAAUA | GGCCGACCTGTACGGCCTTAAGG |
| | | CUCGUAUUGCU (SEQ | CTGAGAAGGCACATGTAAGTGG |
| | | ID NO: 362) | AAAAATGCTTTCCCGTTGTGTTC |
| | | | GCTCACCAAGCACATTTGTTTTT |
| | | | TT (SEQ ID NO: 403) |
| 21 | CasM.286910 | GUUGGAAUCGACCUU | GAAGGCCGACCUGUACGGCCUU |
| | (SEQ ID NO: | AAUUUGAGGUGUGCU | AAGGCUGAGAAGGCACAUGUAA |
| | 17) | UACAGGUAUUAAAUA | GUGGAAAAAUGCUUUCCCGUUG |
| | | CUCGUAUUGCU (SEQ | UGUUCGCUCACCAAGCACAUUU |
| | | ID NO: 362) | GUUUUUUU (SEQ ID NO: 404) |
| 22 | CasM.292335 | GCUGAAAGAGCAGAG | AGGCCGTTATCAACGTTTCGCGG |
| | (SEQ ID NO: | AAUUUGUUGUGUGCA | AAGAGCGGACGAACGGCTGAAG |
| | 18) | UACAGGUAUUAAAUA | GCCGACCTGTACGGCCTAAAGGT |
| | | CUCGUAUUGCU (SEQ | TGAGAAGGCACATGTAAGAGGA |
| | | ID NO: 363) | AAATCGCTTCCCTTTGTGTTCGC |
| | | | TCACCGGGTACACGCGTTTTTTT |
| | | | (SEQ ID NO: 405) |
| 23 | CasM.292335 | GCUGAAAGAGCAGAG | AGGCCGACCUGUACGGCCUAAA |
| | (SEQ ID NO: | AAUUUGUUGUGUGCA | GGUUGAGAAGGCACAUGUAAGA |
| | 18) | UACAGGUAUUAAAUA | GGAAAAUCGCUUCCCUUUGUGU |
| | | CUCGUAUUGCU (SEQ | UCGCUCACCGGGUACACGCGUU |
| | | ID NO: 363) | UUUUU (SEQ ID NO: 406) |
| 24 | CasM.293576 | GUUGGAGUCGGCUUG | TCGTAAATGTTGCGCTAGCCATA |
| | (SEQ ID NO: | AAUCUGCGGGGUGCU | ATGGCAATCGCGTACAGGCAAC |
| | 19) | UACAGGUAUUAAAUA | TGAAGGCCGACCTGTACGGCCTT |
| | | CUCGUAUUGCU (SEQ | AAGGTTGAGAAGGCACATGTCA |
| | | ID NO: 364) | GTGGAAAAATGCTTTCCCTTTGT |
| | | | GTTCGCTCACCAAGCACACGCGG |
| | | | TTTTTT (SEQ ID NO: 407) |
| 25 | CasM.293576 | GUUGGAGUCGGCUUG | AAGGCCGACCUGUACGGCCUUA |
| | ((SEQ ID | AAUCUGCGGGGUGCU | AGGUUGAGAAGGCACAUGUCAG |
| | NO: 19) | UACAGGUAUUAAAUA | UGGAAAAAUGCUUUCCCUUUGU |
| | | CUCGUAUUGCU (SEQ | GUUCGCUCACCAAGCACACGCG |
| | | ID NO: 364) | GUUUUUU (SEQ ID NO: 408) |
| 26 | CasM.294537 | GUUGGAAUCGACCUU | AATGTTTCGCTAACCTTTAAGGT |
| | (SEQ ID NO: | AAUUUGAGGUGUGCU | AATCGCGGGCAGGCGACTGAAG |
| | 20) | UACAGGUAUUAAAUA | GCCGACCTGTACGGCCTTAAGGC |
| | | CUCGUAUUGCU (SEQ | TGAGAAGGCACATGTAAGTGGA |
| | | ID NO: 362) | AAAATGCTTTCCCGTTGTGTTCG |
| | | | CTCACCAAGCACATTTGTTTTTTT |
| | | | (SEQ ID NO: 409) |
| 27 | CasM.294537 | GUUGGAAUCGACCUU | AAGGCCGACCUGUACGGCCUUA |
| | (SEQ ID NO: | AAUUUGAGGUGUGCU | AGGCUGAGAAGGCACAUGUAAG |
| | 20) | UACAGGUAUUAAAUA | UGGAAAAAUGCUUUCCCGUUGU |
| | | CUCGUAUUGCU (SEQ | GUUCGCUCACCAAGCACAUUUG |
| | | ID NO: 362) | UUUUUUU (SEQ ID NO: 410) |
| 28 | CasM.298538 | GUUGUAAGAGACCCG | GGTCGTTGTAAAACGTAACGCTA |
| | (SEQ ID NO: | AAUUUUAGCUGUGUA | GCCTTATGGCAATCGCGAACGA |
| | 21) | UACAGGUAUUAAAUA | ACGACTGAAGGCCGACCTGTAC |
| | | CUCGUAUUGCU (SEQ | GGCCTGAAGGATGAGAAGGCAC |
| | | ID NO: 365) | ATATTAGAGGAAAAAAATGGTT |
| | | | CCCTTTGTGACCGCTCACCAAAC |
| | | | ACATGTTTATTTTT (SEQ ID NO: |
| | | | 411) |
| 29 | CasM.298538 | GUUGUAAGAGACCCG | AAGGCCGACCUGUACGGCCUGA |
| | (SEQ ID NO: | AAUUUUAGCUGUGUA | AGGAUGAGAAGGCACAUAUUAG |
| | 21) | UACAGGUAUUAAAUA | AGGAAAAAAAUGGUUCCCUUUG |
| | | CUCGUAUUGCU (SEQ | UGACCGCUCACCAAACACAUGU |
| | | ID NO: 365) | UUAUUUUU (SEQ ID NO: 412) |
| 30 | CasM.19924 | GUUGUGAAUGCAGGC | AUGAAUAGGAUUCGUCCUAUGG |
| | (SEQ ID NO: | AUUUUUGAUGGUAAA | GGCAGUUGGUUGCCCUUAGCCU |
| | 22) | UCCAACUAUUAAAUA | GAGGCAUUUAUUGCACUCGGGA |
| | | CUCGUAUUGCU (SEQ | AGUACCAUUUCUCA (SEQ ID |
| | | ID NO: 366) | NO:413) |
| 32 | CasM.19952 | ACUGUCAGACAAUGC | AUGAAUAGGAUUCGUCCUAUGG |
| | (SEQ ID NO: | AAAAUGUGUGGUACA | GGCAGUUGGUUGCCCUUAGCCU |
| | 23) | UCCAACUAUUAAAUA | GAGGCAUUUAUUGCACUCGGGA |
| | | CUCGUAUUGCU (SEQ | AGUACCAUUUCUCA (SEQ ID NO: |
| | | ID NO: 367) | 413) |
| 34 | CasM.274559 | GCUGUCAGUAGUAGU | AUGAAUAGGAUUUAUCCUAUGG |
| | (SEQ ID NO: | AAAAAUGGGGGUACA | GGCAGUUGGUUGCCCUUAGCCU |
| | 24) | UCCAACUAUUAAAUA | GAGGCAUUUAAUGCACUCGGGA |
| | | CUCGUAUUGCU (SEQ | AGUACCUUUUCUCA (SEQ ID NO: |
| | | ID NO: 368) | 414) |
| 36 | CasM.286251 | ACUGUCAGUACAUGC | AAGAAUAGGAUUCAUCCUAUGG |
| | (SEQ ID NO: | AAAAAUGAGGGUACA | GGCAGUUGGUUGCCCUUAGCCU |
| | 25) | UCCAACUAUUAAAUA | GAGGAAUUUAAUUCACUCGGGA |
| | | CUCGUAUUGCU (SEQ | AGUACCUUUCUCAU (SEQ ID NO: |
| | | ID NO: 369) | 415) |
| 38 | CasM.288480 | ACUGUCAGACAAUGC | AUGAAUAGGAUUCGUCCUAUGG |
| | (SEQ ID NO: | AAAAUGAGUGGUACA | GGCAGUUGGUUGCCCUUAGCCU |
| | 26) | UCCAACUAUUAAAUA | GAGGCAUUUAUUGCACUCGGGA |
| | | CUCGUAUUGCU (SEQ | AGUACCAUUUCUCA (SEQ ID NO: |
| | | ID NO: 370) | 413) |
| 40 | CasM.288668 | GCUGUUAGAACAUAC | AUGGAUAGGAUUCGUCCUAUGG |
| | (SEQ ID NO: | AAAAUGAAAGGUACA | GGCAGUUGGGACCAUGUAAUGC |
| | 27) | UCCAACUAUUAAAUA | CCUUAGCCUGAGGAAUUCAUUU |
| | | CUCGUAUUGCU (SEQ | CACUCGGGAAGUAU (SEQ ID NO: |
| | | ID NO: 371) | 416) |
| 41 | CasM.289206 | GCUGCAUGUCAUGGC | AUGAAUAGGAUUUAUCCUAUGG |
| | (SEQ ID NO: | AAAAGGAAAGGUACA | GGCAGUUGGUUGCCCUUAGCCU |
| | 28) | UCCAACUAUUAAAUA | GAGGCAUUUAAUGCACUCGGGA |
| | | CUCGUAUUGCU (SEQ | AGUACCUUUUCUCA (SEQ ID NO: |
| | | ID NO: 372) | 414) |
| 43 | CasM.290598 | GCUGUCAGACACCUA | AUGAAUAGGAUUUAUCCUAUGG |
| | (SEQ ID NO: | AAAAAUGAGGGUACA | GGCAGUUGGUUGCCCUUAGCCU |
| | 29) | UCCAACUAUUAAAUA | GAGGCAUUUAAUGCACUCGGGA |
| | | CUCGUAUUGCU (SEQ | AGUACCUUUUCUCA (SEQ ID NO: |
| | | ID NO: 373) | 414) |
| 45 | CasM.290816 | GCUGUGAGUCACAGU | AUGAAUAGGAUUUAUCCUAUGG |
| | (SEQ ID NO: | AAAAAUGAAGGUAUA | GGCAGUUGGAUGCCCUUAGCCU |
| | 30) | UCCAACUAUUAAAUA | GAGGCAUUUAUUGCACUCGGGA |
| | | CUCGUAUUGCU (SEQ | AGUACCUUUUCUCA (SEQ ID NO: |
| | | ID NO: 374) | 417) |
| 47 | CasM.295071 | ACUGUCAGUACAUGC | AAGAAUAGGAUUCAUCCUAUGG |
| | (SEQ ID NO: | AAAAAUGAGGGUACA | GGCAGUUGGUUGCCCUUAGCCU |
| | 31) | UCCAACUAUUAAAUA | GAGGAAUUUAAUUCACUCGGGA |
| | | CUCGUAUUGCU (SEQ | AGUACCUUUCUCAU (SEQ ID NO: |
| | | ID NO: 369) | 415) |
| 49 | CasM.295231 | GCUGUGAGUCACAGU | AUGAAUAGGAUUUAUCCUAUGG |
| | (SEQ ID NO: | AAAAAUGAAGGUAUA | GGCAGUUGGAUGCCCUUAGCCU |
| | 32) | UCCAACUAUUAAAUA | GAGGCAUUUAUUGCACUCGGGA |
| | | CUCGUAUUGCU (SEQ | AGUACCUUUUCUCA (SEQ ID NO: |
| | | ID NO: 374) | 417) |
| 51 | CasM.292139 | GAUGUAUAUGCUAUG | UAUUUUCUAAUGGGGUUGUUG |
| | (SEQ ID NO: | AUUUUGUAUGGUACA | GAAAGAGCUUUUACUGAAAUUU |
| | 33) | UCCAACUAUUAAAUA | GUAAAGGUGCCCUGAACUUGAG |
| | | CUCGUAUUGCU (SEQ | AAUUGAAAAAUUACUCGAG |
| | | ID NO: 375) | (SEQ ID NO: 418) |
| 52 | CasM.292139 | GAUGUAUAUGCUAUG | AUGGGGUUGUUGGAAAGAGCU |
| | (SEQ ID NO: | AUUUUGUAUGGUACA | UUUACUGAAAUUUGUAAAGGU |
| | 33) | UCCAACUAUUAAAUA | GCCCUGAACUUGAGAAUUGAAA |
| | | CUCGUAUUGCU (SEQ | AAUUACUCGAG (SEQ ID NO: 419) |
| | | ID NO: 375) | |
| 54 | CasM.279423 | GCUGUCAGUAGUAGU | AUGAAUAGGAUUUAUCCUAUGG |
| | (SEQ ID NO: | AAAAAUGGGGGUACA | GGCAGUUGGUUGCCCUUAGCCU |
| | 34) | UCCAACUAUUAAAUA | GAGGCAUUUAAUGCACUCGGGA |
| | | CUCGUAUUGCU (SEQ | AGUACCUUUUCUCA (SEQ ID NO: |
| | | ID NO: 368) | 414) |
| 55 | CasM.20054 | GUUGAGCUCUGCAUU | TTCGGGCGGCTCGGCGTCCGTAA |
| | (SEQ ID NO: | ACGCAGAUGAAUGAC | ATCGAGAAAGAGCTTGTAATTCC |
| | 35) | GAGUAUUAAAUACUC | TGATTCTATCAGGTGAAGCAACA |
| | | GUAUUGCU (SEQ ID | CTCGGTAAGGTATAACAATACAC |
| | | NO: 376) | ATGTATAATCCGTGTATTTAAGT |
| | | | TCATTTT (SEQ ID NO: 420) |
| 56 | CasM.20054 | GUUGAGCUCUGCAUU | UUCGGGCGGCUCGGCGUCCGUA |
| | (SEQ ID NO: | ACGCAGAUGAAUGAC | AAUCGAGAAAGAGCUUGUAAUU |
| | 35) | GAGUAUUAAAUACUC | CCUGAUUCUAUCAGGUGAAGCA |
| | | GUAUUGCU (SEQ ID | ACACUCGGUAAGGUAUAAC |
| | | NO: 376) | (SEQ ID NO: 421) |
| 57 | CasM.282673 | GAUGCAACUUAGAUG | ATAAGGGCGGCTCAGCGTCCTA |
| | (SEQ ID NO: | CAUAUGUAAGUUGUG | AAGTCGAGAAAGTATGCGTAAA |
| | 36) | AGUAUUAAAUACUCG | CTTCTTTCATAGAATTGCAGATA |
| | | UAUUGCU (SEQ ID | CTCTCGGCAAGGTAAAAACCCTA |
| | | NO:377) | CAAATTTAATCCTTGTAGGCGAC |
| | | | TTATATTTGTGTATATTT (SEQ ID |
| | | | NO: 422) |
| 58 | CasM.282673 | GAUGCAACUUAGAUG | AUAAGGGCGGCUCAGCGUCCUA |
| | (SEQ ID NO: | CAUAUGUAAGUUGUG | AAGUCGAGAAAGUAUGCGUAAA |
| | 36) | AGUAUUAAAUACUCG | CUUCUUUCAUAGAAUUGCAGAU |
| | | UAUUGCU (SEQ ID NO: | ACUCUCGGCAAGGUAAAA (SEQ |
| | | 377) | ID NO: 423) |
| 59 | CasM.282952 | GUUGCAAUCUGCGUA | ATTCTTTCCTCGGAAAGTGGTAG |
| | (SEQ ID NO: | CAGGCGUAAGAUGUG | ATACTCTCGGTAAGGTAAACTGT |
| | 37) | AGUAUUAAAUACUCG | GTATGAACAGTTTGAAATCCTGC |
| | | UAUUGCU (SEQ ID NO: | ACATAAAATCCGTGCAGGCATCT |
| | | 378) | TATAGTTTTGTGCATCTTT (SEQ |
| | | | ID NO: 424) |
| 60 | CasM.282952 | GUUGCAAUCUGCGUA | AUUCUUUCCUCGGAAAGUGGUA |
| | (SEQ ID NO: | CAGGCGUAAGAUGUG | GAUACUCUCGGUAAGGUAAACU |
| | 37) | AGUAUUAAAUACUCG | GUGUAUGAACAGUUUGAAAUCC |
| | | UAUUGCU (SEQ ID NO: | UGCACAUAAAAUCCGUGCAGGC |
| | | 378) | AUC (SEQ ID NO: 425) |
| 61 | CasM.283262 | GAUCAUAUCUGCUUG | TTCGGGCGGCTCGGCGTCCGTAA |
| | (SEQ ID NO: | UAUGGGUAUGCUGCG | ACCGAGAAAGTATATGTAAGTCT |
| | 38) | AGUAUUAAAUACUCG | GAATTTATTCAGCGTTAGATACA |
| | | UAUUGCU (SEQ ID NO: | CTCGGTAAGGTTCAAACAATACA |
| | | 379) | TATTCAATCCATGTATTCAGTAT |
| | | | ATTTGTACATTTTT (SEQ ID NO: |
| | | | 426) |
| 62 | CasM.283262 | GAUCAUAUCUGCUUG | UUCGGGCGGCUCGGCGUCCGUA |
| | (SEQ ID NO: | UAUGGGUAUGCUGCG | AACCGAGAAAGUAUAUGUAAGU |
| | 38) | AGUAUUAAAUACUCG | CUGAAUUUAUUCAGCGUUAGAU |
| | | UAUUGCU (SEQ ID NO: | ACACUCGGUAAGGUUCAAAC |
| | | 379) | (SEQ ID NO: 427) |
| 63 | CasM.284833 | GUUGCAACUUACGCA | TTCAGGGCGACTCGGCGTCCTAA |
| | (SEQ ID NO: | UAGGUGUAAAAUACG | AATCGAGAAAGTGTACATAAAT |
| | 39) | AGUAUUAAAUACUCG | TTTTAACAAAATACGGTAAATAC |
| | | UAUUGCU (SEQ ID NO: | TCTCGGTAAGGTTTTAACGTGCA |
| | | 380) | CATAATAATCCGTGCAACAGGGT |
| | | | TACACTTTTGTGCAATTTT (SEQ |
| | | | ID NO: 428) |
| 64 | CasM.284833 | GUUGCAACUUACGCA | UUCAGGGCGACUCGGCGUCCUA |
| | (SEQ ID NO: | UAGGUGUAAAAUACG | AAAUCGAGAAAGUGUACAUAAA |
| | 39) | AGUAUUAAAUACUCG | UUUUUAACAAAAUACGGUAAAU |
| | | UAUUGCU (SEQ ID NO: | ACUCUCGGUAAGGUUUUAAC |
| | | 380) | (SEQ ID NO: 429) |
| 65 | CasM.287700 | GAUUAUAUCUGCUUG | UUCGGGCGGCUCGGCGUCCGUA |
| | ((SEQ ID | UAUGGGUAUACUGCG | AACCGAGAAAGUAUAUGUAAGU |
| | NO: 40) | AGUAUUAAAUACUCG | CUGAAUUUAUUCAGCGUUAGAU |
| | | UAUUGCU (SEQ ID NO: | ACACUCGGUAAGGUUUAAAC |
| | | 381) | (SEQ ID NO: 430) |
| 66 | CasM.291507 | GUUGCAACUUACGCA | TTCAGGGCGACTCGGCGTCCTAA |
| | (SEQ ID NO: | UAGGUGUAAAAUACG | AATCGAGAAAGTGTACATAAGT |
| | 41) | AGUAUUAAAUACUCG | TTTTAACAAAATACGGTAAATAC |
| | | UAUUGCU (SEQ ID NO: | TCTCGGTAAGGTTTTAACGTGCA |
| | | 380) | CATAATAATCCGTGCAACAGGGT |
| | | | TACACTTTTGTGCAATTTT (SEQ |
| | | | ID NO: 431) |
| 67 | CasM.291507 | GUUGCAACUUACGCA | UUCAGGGCGACUCGGCGUCCUA |
| | (SEQ ID NO: | UAGGUGUAAAAUACG | AAAUCGAGAAAGUGUACAUAAG |
| | 41) | AGUAUUAAAUACUCG | UUUUUAACAAAAUACGGUAAAU |
| | | UAUUGCU (SEQ ID NO: | ACUCUCGGUAAGGUUUUAACG |
| | | 380) | (SEQ ID NO: 432) |
| 68 | CasM.293410 | UCAGCUCACAACCUA | TATTAAGGGCGGCTCAGCGTCCT |
| | (SEQ ID NO: | CAUAUGCAUACAAGA | TAAGTCGAGAAAGTATACATAA |
| | 42) | UAUAUCGUUAUUAAA | ATTTCTTATATAGAATAGTAGAT |
| | | UACUCGUAUUGCU | ACTCTCGGCAAGGTATAAACCCT |
| | | (SEQ ID NO: 382) | ACAAATTTAATCCTTGTAGGCAA |
| | | | CTTATATTTGTATTTATTT (SEQ |
| | | | ID NO: 433) |
| 69 | CasM.293410 | UCAGCUCACAACCUA | UAUUAAGGGCGGCUCAGCGUCC |
| | (SEQ ID NO: | CAUAUGCAUACAAGA | UUAAGUCGAGAAAGUAUACAUA |
| | 42) | UAUAUCGUUAUUAAA | AAUUUCUUAUAUAGAAUAGUA |
| | | UACUCGUAUUGCU | GAUACUCUCGGCAAGGUAUAAA |
| | | (SEQ ID NO: 382) | CC (SEQ ID NO: 434) |
| 70 | CasM.295105 | GAUCAUAUCUGCUUG | TTTCGGGCGGCTCGGCGTCCGTA |
| | (SEQ ID NO: | UAUGGGUAUGCUGCG | AACCGAGAAAGTATATGTAAGT |
| | 43) | AGUAUUAAAUACUCG | CTGAATTTATTCAGCGTTAGATA |
| | | UAUUGCU (SEQ ID NO: | CACTCGGTAAGGTTCAAACAATA |
| | | 379) | CATATTCAATCCATGTATTCAGT |
| | | | ATATTTGTACATTTTT (SEQ ID |
| | | | NO: 435) |
| 71 | CasM.295105 | GAUCAUAUCUGCUUG | UUUCGGGCGGCUCGGCGUCCGU |
| | (SEQ ID NO: | UAUGGGUAUGCUGCG | AAACCGAGAAAGUAUAUGUAAG |
| | 43) | AGUAUUAAAUACUCG | UCUGAAUUUAUUCAGCGUUAGA |
| | | UAUUGCU (SEQ ID NO: | UACACUCGGUAAGGUUCAAAC |
| | | 379) | (SEQ ID NO: 436) |
| 72 | CasM.295187 | GAUAUAUCUUGUAUG | ATATTAAGGGCGGCTCAGCGTCC |
| | (SEQ ID NO: | CAUAUGUAGGUUGUG | TTAAGTCGAGAAAGTATACATA |
| | 44) | AGUAUUAAAUACUCG | AATTTCTTATATAGAATAGTAGA |
| | | UAUUGCU (SEQ ID NO: | TACTCTCGGCAAGGTATAAACCC |
| | | 383) | TACAAATTTAATCCTTGTAGGCA |
| | | | ACTTATATTTGTATTTATTT (SEQ |
| | | | ID NO: 437) |
| 73 | CasM.295187 | GAUAUAUCUUGUAUG | AUAUUAAGGGCGGCUCAGCGUC |
| | (SEQ ID NO: | CAUAUGUAGGUUGUG | CUUAAGUCGAGAAAGUAUACAU |
| | 44) | AGUAUUAAAUACUCG | AAAUUUCUUAUAUAGAAUAGU |
| | | UAUUGCU (SEQ ID NO: | AGAUACUCUCGGCAAGGUAUAA |
| | | 383) | AC (SEQ ID NO: 438) |
| 74 | CasM.295929 | GUUGCAAUGAACGUA | AAACAAGGGCGGCTCAACGTCC |
| | (SEQ ID NO: | UGUGCAUGAGGUGUG | TAGAATCGAGAAAGTATGCGTA |
| | 45) | AGUAUUAAAUACUCG | AGACTTATTTATTGAGCGGTAGA |
| | | UAUUGCU (SEQ ID NO: | TACTCTCGGTAAGGTATAAATTC |
| | | 384) | CACAATGAAAATCCTGTGGACA |
| | | | CCGTATAATATGTGCATGTTT |
| | | | (SEQ ID NO: 439) |
| 75 | CasM.295929 | GUUGCAAUGAACGUA | AAACAAGGGCGGCUCAACGUCC |
| | (SEQ ID NO: | UGUGCAUGAGGUGUG | UAGAAUCGAGAAAGUAUGCGUA |
| | 45) | AGUAUUAAAUACUCG | AGACUUAUUUAUUGAGCGGUAG |
| | | UAUUGCU (SEQ ID NO: | AUACUCUCGGUAAGGUAUAAAU |
| | | 384) | UC (SEQ ID NO: 440) |

TABLE 26
Exemplary sgRNAs for CasM Effector Proteins

| Comp. | Effector | |
|---|---|---|
| No | protein | SgRNA |
| 31 | CasM.19924 | UGGGGCAGUUGGUUGCCCUUAGCCUGAGGCAUU |
| | (SEQ ID NO: | UAUUGCACUCGGGAAGUACCAUUUCUCAGAAAU |
| | 22) | GGUACAUCCAACUAUUAAAUACUCGUAUUGCU |
| | | ((SEQ ID NO: 441) |
| 33 | CasM.19952 | UGGGGCAGUUGGUUGCCCUUAGCCUGAGGCAUU |
| | (SEQ ID NO: | UAUUGCACUCGGGAAGUACCAUUUCUCAGAAAU |
| | 23) | GGUACAUCCAACUAUUAAAUACUCGUAUUGCU |
| | | (SEQ ID NO: 441) |
| 35 | CasM.274559 | AUGGGGCAGUUGGUUGCCCUUAGCCUGAGGCAU |
| | (SEQ ID NO: | UUAAUGCACUCGGGAAGUACCUUUUCUCAGAAA |
| | 24) | UGGUACAUCCAACUAUUAAAUACUCGUAUUGCU |
| | | (SEQ ID NO: 442) |
| 37 | CasM.286251 | AUGGGGCAGUUGGUUGCCCUUAGCCUGAGGAAU |
| | (SEQ ID NO: | UUAAUUCACUCGGGAAGUACCUUUCUCAUGAAA |
| | 25) | UGGUACAUCCAACUAUUAAAUACUCGUAUUGCU |
| | | (SEQ ID NO: 443) |
| 39 | CasM.288480 | UGGGGCAGUUGGUUGCCCUUAGCCUGAGGCAUU |
| | (SEQ ID NO: | UAUUGCACUCGGGAAGUACCAUUUCUCAGAAAU |
| | 26) | GGUACAUCCAACUAUUAAAUACUCGUAUUGCU |
| | | (SEQ ID NO: 441) |
| 42 | CasM.289206 | AUGGGGCAGUUGGUUGCCCUUAGCCUGAGGCAU |
| | (SEQ ID NO: | UUAAUGCACUCGGGAAGUACCUUUUCUCAGAAA |
| | 28) | UGGUACAUCCAACUAUUAAAUACUCGUAUUGCU |
| | | (SEQ ID NO: 442) |
| 44 | CasM.290598 | AUGGGGCAGUUGGUUGCCCUUAGCCUGAGGCAU |
| | (SEQ ID NO: | UUAAUGCACUCGGGAAGUACCUUUUCUCAGAAA |
| | 29) | UGGUACAUCCAACUAUUAAAUACUCGUAUUGCU |
| | | (SEQ ID NO: 442) |
| 46 | CasM.290816 | AUGGGGCAGUUGGAUGCCCUUAGCCUGAGGCAU |
| | (SEQ ID NO: | UUAUUGCACUCGGGAAGUACCUUUUCUCAGAAA |
| | 30 | UGGUACAUCCAACUAUUAAAUACUCGUAUUGCU |
| | | (SEQ ID NO: 444) |
| 48 | CasM.295071 | AUGGGGCAGUUGGUUGCCCUUAGCCUGAGGAAU |
| | (SEQ ID NO: | UUAAUUCACUCGGGAAGUACCUUUCUCAUGAAA |
| | 31) | UGGUACAUCCAACUAUUAAAUACUCGUAUUGCU |
| | | (SEQ ID NO: 443) |
| 51 | CasM.295231 | AUGGGGCAGUUGGAUGCCCUUAGCCUGAGGCAU |
| | (SEQ ID NO: | UUAUUGCACUCGGGAAGUACCUUUUCUCAGAAA |
| | 32 | UGGUACAUCCAACUAUUAAAUACUCGUAUUGCU |
| | | (SEQ ID NO: 444) |
| 53 | CasM.292139 | TTATTAGAAATGAAATATTTTCTAATGGGGTTG |
| | (SEQ ID NO: | TTGGAAAGAGCTTTTACTGAAATTTGTAAAGGT |
| | 33) | GCCCTGAACTTGAGAATTGAAAAATTACTCGAG |
| | | GAAATGGTACATCCAACTATTAAATACTCGTAT |
| | | TGCT (SEQ ID NO: 445) |

TABLE 27
Observed Cis Cleavage for Effector Protein/Guide Combinations

| | | cis- | | | |
|---|---|---|---|---|---|
| Comp. | | cleavage | | | |
| No: | Effector Protein | (y/n) | crRNA # | tracrRNA # | sgRNA # |
| 1 | CasM.298706 | Y | R4879 (SEQ ID | R4935 (SEQ ID | — |
| | (SEQ ID NO: 1) | | NO: 347) | NO: 385) | |
| 4 | CasM.284933 | Y | R4841 (SEQ ID | R4902 (SEQ ID | — |
| | (SEQ ID NO: 4) | | NO: 350) | NO: 388) | |
| 13 | CasM.297894 | Y | R4987 (SEQ ID | R4904 (SEQ ID | — |
| | (SEQ ID NO: 13) | | NO: 358) | NO: 396) | |
| 14 | CasM.291449 | N | R4875 (SEQ ID | R4939 (SEQ ID | — |
| | (SEQ ID NO: 14) | | NO: 359) | NO: 397) | |
| 15 | CasM.291449 | N | R4875 (SEQ ID | R4938 (SEQ ID | — |
| | (SEQ ID NO: 14) | | NO: 359) | NO: 398) | |
| 16 | CasM.297599 | Y | R4876(SEQ ID | R4892 (SEQ ID | — |
| | (SEQ ID NO: 15) | | NO: 360) | NO: 399) | |
| 17 | CasM.297599 | Y | R4876 (SEQ ID | R4942 (SEQ ID | — |
| | (SEQ ID NO: 15) | | NO: 360) | NO: 400) | |
| 23 | CasM.292335 | Y | R4851 (SEQ ID | R4907 (SEQ ID | — |
| | (SEQ ID NO: 18) | | NO: 363) | NO: 406) | |
| 24 | CasM.293576 | Y | R4852 (SEQ ID | R4896(SEQ ID | — |
| | (SEQ ID NO: 19) | | NO: 364) | NO: 407) | |
| 28 | CasM.298538 | Y | R4854 (SEQ ID | R4897 (SEQ ID | — |
| | (SEQ ID NO: 21) | | NO: 365) | NO: 411) | |
| 30 | CasM.19924 | Y | R4855 (SEQ ID | R4893 (SEQ ID | — |
| | (SEQ ID NO: 22) | | NO: 366) | NO: 413) | |
| 31 | CasM.19924 | Y | — | — | R4886 |
| | (SEQ ID NO: 22) | | | | ((SEQ ID |
| | | | | | NO: 441) |
| 32 | CasM.19952 | Y | R4856 (SEQ ID | R4893 (SEQ ID | — |
| | (SEQ ID NO: 23) | | NO: 367) | NO: 413) | |
| 33 | CasM.19952 | Y | — | — | R4886 |
| | (SEQ ID NO: 23) | | | | (SEQ ID |
| | | | | | NO: 441) |
| 34 | CasM.274559 | Y | R4857 (SEQ ID | R4894 (SEQ ID | — |
| | (SEQ ID NO: 24) | | NO: 368) | NO: 414) | |
| 35 | CasM.274559 | Y | — | — | R4887(SEQ |
| | (SEQ ID NO: 24) | | | | ID NO: 442) |
| 36 | CasM.286251 | Y | R4858 (SEQ ID | R4910 (SEQ ID | — |
| | (SEQ ID NO: 25) | | NO: 369) | NO: 415) | |
| 37 | CasM.286251 | Y | — | — | R4882 |
| | (SEQ ID NO: 25) | | | | (SEQ ID |
| | | | | | NO: 443) |
| 39 | CasM.288480 | Y | — | — | R4886 |
| | (SEQ ID NO: 26) | | | | (SEQ ID |
| | | | | | NO: 441) |
| 41 | CasM.289206 | Y | R4861 (SEQ ID | R4894 (SEQ ID | — |
| | 289206 (SEQ ID | | NO: 372) | NO: 414) | |
| | NO: 28) | | | | |
| 42 | CasM.289206 | Y | — | — | R4887 |
| | (SEQ ID NO: 28) | | | | (SEQ ID |
| | | | | | NO: 442) |
| 43 | CasM.290598 | Y | R4862 (SEQ ID | R4894 (SEQ ID | — |
| | (SEQ ID NO: 29) | | NO: 373) | NO: 414) | |
| 45 | CasM.290816 | Y | R4863 (SEQ ID | R4912 (SEQ ID | — |
| | (SEQ ID NO: 30) | | NO: 374) | NO: 417) | |
| 48 | CasM.295071 | Y | — | — | R4882(SEQ |
| | (SEQ ID NO: 31) | | | | ID NO: 443) |
| 50 | CasM.295231(SE | Y | — | — | R4884 |
| | Q ID NO: 32) | | | | (SEQ ID |
| | | | | | NO: 444) |
| 54 | CasM.279423 | Y | R4857 (SEQ ID | R4894 (SEQ ID | |
| | (SEQ ID NO: 34) | | NO: 368) | NO: 414) | |
| 71 | CasM.295105 | Y | R4872(SEQ ID | R4925 (SEQ ID | |
| | (SEQ ID NO: 43) | | NO: 379) | NO: 436) | |
| 72 | CasM.295187 | Y | R4873 (SEQ ID | R4945(SEQ ID | |
| | (SEQ ID NO: 44) | | NO: 383) | NO: 437) | |
| 74 | CasM.295929 | Y | R4874 (SEQ ID | R4928 (SEQ ID | |
| | (SEQ ID NO: 45) | | NO: 384) | NO: 439) | |
| 75 | CasM.295929 | Y | R4874 (SEQ ID | R4927 (SEQ ID | |
| | (SEQ ID NO: 45) | | NO: 384) | NO: 440) | |

TABLE 28
Exemplary PAM Sequences

| | Effector | | |
|---|---|---|---|
| Composition | Protein | Amino Acid | PAM |
| No | Name | SEQ ID NO: | Sequence |
| 1 | CasM.298706 | 1 | CTT |
| 13 | CasM.297894 | 13 | CTT |
| 16 | CasM.297599 | 15 | CC |
| 17 | CasM.297599 | 15 | CC |
| 23 | CasM.292335 | 18 | CC |
| 24 | CasM.293576 | 19 | CC |
| 28 | CasM.298538 | 21 | TC |
| 30 | CasM.19924 | 22 | TCG |
| 31 | CasM.19924 | 22 | GCG |
| 32 | CasM.19952 | 23 | TCG, TTG, |
| | | | GCG, GTG |
| 33 | CasM.19952 | 23 | TCG, TTG, |
| | | | GCG, GTG |
| 34 | CasM.274559 | 24 | TCG |
| 35 | CasM.274559 | 24 | TCG |
| 36 | CasM.286251 | 25 | ATTA, ATTG, |
| | | | GTTA, GTTG |
| 37 | CasM.286251 | 25 | ATTA, ATTG, |
| | | | GTTA, GTTG |
| 39 | CasM.288480 | 26 | TCG |
| 41 | CasM.289206 | 28 | ATTA, ATTG, |
| | | | GTTA, GTTG |
| 42 | CasM.289206 | 28 | ATTA, ATTG, |
| | | | GTTA, GTTG |
| 43 | CasM.290598 | 29 | ATTG, ACTG, |
| | | | GTTG, GCTG |
| 46 | CasM.290816 | 30 | TCG |
| 48 | CasM.295071 | 31 | ATTA, ATTG, |
| | | | GTTA, GTTG |
| 50 | CasM.295231 | 32 | TCG or GCG |
| 54 | CasM.279423 | 34 | ATTA, ATTG, |
| | | | GTTA, GTTG |
| 71 | CasM.295105 | 43 | TTC |
| 72 | CasM.295187 | 44 | TTC |
| 74 | CasM.295929 | 45 | TTT, TTC |
| 75 | CasM.295929 | 45 | TTT, TTC |

[0389] FIG. 15 illustrates the composition of the sequences derived from libraries digested with RNP complexes comprising the denoted effector proteins. As shown in FIG. 15, examination of the PFM derived WebLogos (FIG. 15) revealed the presence of enriched 5′ PAM consensus sequences for the various effector proteins.

### Example 14. Generation of CAR T Cells Directed to CD-19 and Cytotoxicity to CD-19-Expressing Cells

[0390] This example demonstrates the generation of CART cells by integration of a CD-19 specific CAR into the TRAC locus of T cells using RNP complexes of CasΦ and a TRAC specific guide RNA, and the cytotoxic activity of such cells on CD19-expressing NALM-6 cells.

### Thawing, Resting and Activating T Cells

[0391] In a 15 ml falcon tube, 100 μg/ml DNase I (100 μl) was added to 9 ml T Cell Media and pre-warm in a 37° C. cell culture incubator for 15-20 mins. A vial of frozen Pan T cells (STEMCELL Technologies; Cat #70024) containing 2×10⁷ cells per vial were thawed in a 37° C. water bath. Cells were slowly added using a 1000 ul micropipette to the pre-warmed media containing DNase I, and incubated at 37° C. and 5% CO2 for 1 hour. After an hour, the tubes were centrifuged at 1350 rpm for 5 mins. The media was removed and 5 ml of fresh pre-warmed T Cell Media was added. Cells were counted (1.5×10⁷ cells counted). With a loosen cap, the tubes were placed on a rack and allowed to rest overnight at 37° C. and 5% CO₂. Based on the cell count, cells were resuspended at a concentration of 1×10⁶ cells/ml and transferred to a fresh, sterile T-75 flask. Dynabeads (3 beads per cell) were added and incubated at 37° C. and 5% CO₂ for 3 days.

### Transfection of RNP Complexes

[0392] RNP complexes were generated by mixing 500 pmol TRAC CasΦ guide RNA (CUUUCAAGACUAAUAGAUUGCUCCUUACGAGGAGACGAGUCUCUCAGCUGGUACA C (SEQ ID NO: 1382)) with 250 pmol CasΦ.12 for an RNA:Effector Protein ratio of 2:1, an incubated at RT for 30 mins. Activated T cells were transferred from T-75 flask to a 15 ml tube and all Dynabeads were removed from the cells (debeading) by placing the tube in a magnetic stand for 5 mins. Cells were resuspended in P3 solution at a concentration of 2.5×10⁷ cells/ml and 20 μl of this suspension was used for each reaction. The RNPs were mixed with the cells just before the electroporation. 20 μl of this mixture was added to each well of the nucleofection plate and electroporated. After nucleofection, 180 ul of pre-warmed T cell media was added to all the reaction wells and allowed to sit at 37° C. and 5% CO₂ for 10 mins. After this recovery incubation, the electroporated cells were transferred to a 48-well plate, including combining 2 wells of the same condition from the plate into one well of the destination 48-well plate so that the final volume in each well is 500 μl. Cells were incubated at 37° C. and 5% CO₂ for 2 hours before AAV transduction.

### AAV Transduction

[0393] Following transfection of RNP complexes, AAV6 particles containing a donor nucleotide sequence encoding either a CD19-CAR or a GFP marker were added at an 1×10⁵ MOI of the electroporated T cells. The plates were placed back into 37° C. and 5% CO₂ and analyzed after 5 days of culturing.

### Analysis of CD19-CAR Integrationbyflow Cytometry

[0394] Cells were resuspend in the media and 150 μl was transferred to a fresh plate. The remaining approximately 50 μl cells were used for genomic DNA extraction. The new plate was centrifuged at 1500 rpm for 5 mins and the media was discarded.

[0395] In order to assess the number of live/dead cells, Zombie NIR Fixable Viability Dye was diluted 1:1000 and then 100 μl per sample was added, resuspended and incubated at RT for 15 min in the dark. 150 μl of PBS was added to the wells and pipette mixed to wash. The plate was spun at 1500 rpm for 5 min.

[0396] In order to stain the cells, extracellular staining was conducted as follows. Blocking—0.5 μl/sample normal goat IgG was added to block non-specific cell surface receptors in FACS buffer. Samples were incubated for 20 mins at 4° C. and washed. CD19-CAR 1° Ab staining—1 μl/sample of Biotin-tagged mouse IgG was added in FACS Buffer to stain the CD19-CAR construct. Samples were incubated for 25 mins at 4° C. and washed. CD19-CAR 2° Ab and CD3 staining—0.33 μl Streptavidin-PE and 5 μl anti-CD3 antibody (APC) was added in FACS Buffer to each sample. Samples were incubated for 25 mins at 4° C. and washed. All samples were spun at 1500 rpm for 5 mins and cells were resuspended in 100 μl FACS Buffer and run on flow cytometer.

[0397] Voltages of lasers on the flow cytometer were set in accordance with compensation controls. All stained samples were run using these voltages. Gates were set using isotype controls for the antibodies and FMO control for the L/D Zombie NIR stain. Flow data was analyzed using FlowJo v10 and graphs were plotted using GraphPad Prism.

### Enrichment of Cd3⁻ Cells —Magnetic Bead Separation

[0398] CD3⁻ cells were separated using the MojoSort™ Human CD3 Selection Kit according to manufacturer's instructions.

### Cell Killing Assay —LDH Release

[0399] The LDH Assay was performed according to manufacturer's instructions. Briefly, Target Cells (NALM6), Effector Cells (CD19-CAR T cells) and controls were added to a U-bottom 96-well plate in 100 μl media and incubated at 37° C. for 24 hours. To make CytoTox 96 Reagent: Assay Buffer from kit was thawed, and 12 ml was added to one amber bottle of Substrate Mix. Assay buffer was made fresh before every readout. After 24 hours, the assay plate was spun at 1500 rpm for 5 mins. 50 μl from each well was removed and transferred to a new flat bottom 96-well plate. 50 μl of the CytoTox 96 Reagent was added and incubated in the dark at RT for 30 mins. 50 μl Stop Solution was added and read at 490 nm on a spectrophotometer within 1 hour. Specific cytotoxicity of the NALM6 cells was calculated by the following formula: % Cytotoxicity=[(Experimental−Effector Spont. Release-Target Spont. Release)/(Target Max. Release−Target Spont. Release)]*100

### CD3⁻ Cell Enrichment

[0400] The percentage of CD3⁻ cells increased from 87.7% before sorting to 97.2% after sorting.

### Efficiencies of Integration

[0401] In the CD19-CAR samples, approximately 30% CAR integration was observed in CD3⁻ or TRAC KO subset of the T cells. In the GFP samples, approximately 49% or 60% of GFP integration was observed in the CD3⁻ or TRAC KO subset of the T cells.

### Cytotoxicity

[0402] Exemplary results are shown in FIG. 16 and FIG. 17. In all experiments, the CD19-CAR T cells showed significantly higher cell killing than the GFP⁺ or the control T cells in a dose dependent manor. For example, in a first experiment, at a ratio of 1:1 (Effector Cells:Target Cells), there was approximately 40% cytotoxicity and at a ratio of 5:1, cytotoxicity went up to approximately 60%. In a second experiment, at ratios of 0.5:1, 1:1, and 5:1 there was approx. 10%, 30%, and 50% cytotoxicity, respectively.

### Example 15. Production of CAR T-Cells with AAV Vector Encoding an Effector Protein, Guide RNAs Targeting TRAC, B2M and CIITA, and Donor Sequence Encoding a CAR

[0403] An AAV vector is constructed to contain multiple nucleotide sequences between its ITRs, wherein these nucleotide sequences provide or encode, in a 5′ to 3′ direction, a donor nucleic acid encoding a CAR and nucleotide sequences flacking the CAR encoding sequence directing integration of the donor into the TRAC gene, a first promoter, a guide nucleic acid having a sequence complementary to an equal length portion of a TRAC encoding sequence, a second promoter, a guide nucleic acid having a sequence complementary to an equal length portion of a B2M encoding sequence, a third promoter, a guide nucleic acid having a sequence complementary to an equal length portion of a CIITA encoding sequence, a fourth promoter, an effector protein having a nuclear localization signal, and a poly A tail. The size of the donor nucleic acid is about 1 kb. The size of the Cas effector is less than 600 amino acids. The total length of the AAV vector, including the ITRs, is about 4.8 kb. The AAV vector is expressed with supporting plasmids to produce AAV particles containing the AAV vector. T cells from a healthy donor subject are contacted with the AAV particles. After about 48 hours, DNA or RNA is isolated from the transduced cells. Expression of the CAR and reduced expression of the TRAC, B2M and CIITA genes is confirmed by Q-PCR.

### Example 16. Indel Generation in Eukaryotic Cells with CasM.265466 and Guides Targeting B2M

[0404] Guides targeting exon 1 or exon 2 of B2M were tested with Cas 265466 (SEQ ID NO: 2435) for the ability to produce indels in primary T Cells. 16 modified guide RNA sequences (i.e., a phosphorothioate bond between the nucleotides, a 2′-OMe modification) directed to various target sequences were tested and their ability to introduce indels was measured. Briefly, about 30×10⁶ T cells were electroporated with a mixture of mRNA of the Cas 265466 (5 μg) and different guides (500 μmol). The transfected cells were incubated for ˜72 hours to allow for indel formation followed by DNA extraction.

[0405] After the 72-hour incubation, a portion of the cells were incubated with a Live/Dead cell stain and a B2M antibody for fluorescence-activated cell sorting (FACS) analysis. Indels were detected by next generation sequencing (NGS) of PCR amplicons at the targeted loci 3 days and 7 days post-transfection. Indel percentage was calculated as the fraction of sequencing reads containing insertions or deletions relative to an unedited reference sequence. The effector proteins Cas9 and Cas 12a were used as a positive control. The results are summarized in TABLE 29. An analysis of the results indicates that the effector protein CasM.265466 mRNA and the guides targeting B32M gene can be used for editing the gene.

TABLE 29
Exemplary modified guides for B2M editing in T cells

| | | | | | | Sequence | |
|---|---|---|---|---|---|---|---|
| | | | | | FACS | Analysis | |
| Effector | | gRNA | | | %-ve | % | % |
| Protein | 5′ | SEQ | | | Cells | Indels | Indels |
| SEQ ID | PAM | ID | RNA | Target | (3 | (3 | (7 |
| NO | Seq | NO: | Modification | Gene | days) | days) | days) |
| 1 | TGTG | 2436 | mA*mC*mA*GCUUAU | B2M | • | •• | •• |
| | | | UUGGAAGCUGAAAUG | exon: | | | |
| | | | UGAGGUUUAUAACAC | #1 | | | |
| | | | UCACAAGAAUCCUGA | | | | |
| | | | AAAAGGAUGCCAAAC | | | | |
| | | | CUCGCGCUACUCUCU | | | | |
| | | | CUmU*mU*mC | | | | |
| 1 | TCTG | 2437 | mA*mC*mA*GCUUAU | B2M | •• | ••• | •• |
| | | | UUGGAAGCUGAAAUG | exon: | | | |
| | | | UGAGGUUUAUAACAC | #2 | | | |
| | | | UCACAAGAAUCCUGA | | | | |
| | | | AAAAGGAUGCCAAAC | | | | |
| | | | GGUUUCAUCCAUCCG | | | | |
| | | | ACmA*mU*mU | | | | |
| 1 | TGTA | 2438 | mA*mC*mA*GCUUAU | B2M | ••• | ••• | ••• |
| | | | UUGGAAGCUGAAAUG | exon: | | | |
| | | | UGAGGUUUAUAACAC | #2 | | | |
| | | | UCACAAGAAUCCUGA | | | | |
| | | | AAAAGGAUGCCAAAC | | | | |
| | | | CUACACUGAAUUCAC | | | | |
| | | | CCmC*mC*mA | | | | |
| 1 | TCTA | 2439 | mA*mC*mA*GCUUAU | B2M | • | •• | •• |
| | | | UUGGAAGCUGAAAUG | exon: | | | |
| | | | UGAGGUUUAUAACAC | #2 | | | |
| | | | UCACAAGAAUCCUGA | | | | |
| | | | AAAAGGAUGCCAAAC | | | | |
| | | | UCUCUUGUACUACAC | | | | |
| | | | UGmA*mA*mU | | | | |
| 1 | TTTA | 2440 | mA*mC*mA*GCUUAU | B2M | • | •• | •• |
| | | | UUGGAAGCUGAAAUG | exon: | | | |
| | | | UGAGGUUUAUAACAC | #2 | | | |
| | | | UCACAAGAAUCCUGA | | | | |
| | | | AAAAGGAUGCCAAAC | | | | |
| | | | CUCACGUCAUCCAGC | | | | |
| | | | AGmA*mG*mA | | | | |
| 1 | TATG | 2441 | mA*mC*mA*GCUUAU | B2M | •• | ••• | •• |
| | | | UUGGAAGCUGAAAUG | exon: | | | |
| | | | UGAGGUUUAUAACAC | #2 | | | |
| | | | UCACAAGAAUCCUGA | | | | |
| | | | AAAAGGAUGCCAAAC | | | | |
| | | | UGUCUGGGUUUCAUC | | | | |
| | | | CAmU*mC*mC | | | | |
| 1 | TATG | 2442 | mA*mC*mA*GCUUAU | B2M | • | • | • |
| | | | UUGGAAGCUGAAAUG | exon: | | | |
| | | | UGAGGUUUAUAACAC | #2 | | | |
| | | | UCACAAGAAUCCUGA | | | | |
| | | | AAAAGGAUGCCAAAC | | | | |
| | | | CCUGCCGUGUGAACC | | | | |
| | | | AUmG*mU*mG | | | | |
| 1 | TTTG | 2443 | mA*mC*mA*GCUUAU | B2M | • | • | • |
| | | | UUGGAAGCUGAAAUG | exon: | | | |
| | | | UGAGGUUUAUAACAC | #2 | | | |
| | | | UCACAAGAAUCCUGA | | | | |
| | | | AAAAGGAUGCCAAAC | | | | |
| | | | UCACAGCCCAAGAUA | | | | |
| | | | GUmU*mA*mA | | | | |
| 1 | TGTG | 2444 | mA*mC*mA*GCUUAU | B2M | •• | •• | •• |
| | | | UUGGAAGCUGAAAUG | exon: | | | |
| | | | UGAGGUUUAUAACAC | #2 | | | |
| | | | UCACAAGAAUCCUGA | | | | |
| | | | AAAAGGAUGCCAAAC | | | | |
| | | | ACUUUGUCACAGCCC | | | | |
| | | | AAmG*mA*mU | | | | |
| 1 | TGTG | 2445 | mA*mC*mA*GCUUAU | B2M | • | • | • |
| | | | UUGGAAGCUGAAAUG | exon: | | | |
| | | | UGAGGUUUAUAACAC | #2 | | | |
| | | | UCACAAGAAUCCUGA | | | | |
| | | | AAAAGGAUGCCAAAC | | | | |
| | | | UCUGGGUUUCAUCCA | | | | |
| | | | UCmC*mG*mA | | | | |
| 1 | TGTG | 2446 | mA*mC*mA*GCUUAU | B2M | • | • | • |
| | | | UUGGAAGCUGAAAUG | exon: | | | |
| | | | UGAGGUUUAUAACAC | #2 | | | |
| | | | UCACAAGAAUCCUGA | | | | |
| | | | AAAAGGAUGCCAAAC | | | | |
| | | | AACCAUGUGACUUUG | | | | |
| | | | UCmA*mC*mA | | | | |
| 1 | TCTG | 2447 | mA*mC*mA*GCUUAU | B2M | •• | ••• | ••• |
| | | | UUGGAAGCUGAAAUG | exon: | | | |
| | | | UGAGGUUUAUAACAC | #2 | | | |
| | | | UCACAAGAAUCCUGA | | | | |
| | | | AAAAGGAUGCCAAAC | | | | |
| | | | AAUGCUCCACUUUUU | | | | |
| | | | CAmA*mU*mU | | | | |
| 1 | TTTG | 2448 | mA*mC*mA*GCUUAU | B2M | • | •• | •• |
| | | | UUGGAAGCUGAAAUG | exon: | | | |
| | | | UGAGGUUUAUAACAC | #2 | | | |
| | | | UCACAAGAAUCCUGA | | | | |
| | | | AAAAGGAUGCCAAAC | | | | |
| | | | ACUUUCCAUUCUCUG | | | | |
| | | | CUmG*mG*mA | | | | |
| 1 | TGTG | 2449 | mA*mC*mA*GCUUAU | B2M | ••• | ••• | ••• |
| | | | UUGGAAGCUGAAAUG | exon: | | | |
| | | | UGAGGUUUAUAACAC | #2 | | | |
| | | | UCACAAGAAUCCUGA | | | | |
| | | | AAAAGGAUGCCAAAC | | | | |
| | | | ACAAAGUCACAUGGU | | | | |
| | | | UCmA*mC*mA | | | | |
| 1 | TGTA | 2450 | mA*mC*mA*GCUUAU | B2M | • | • | • |
| | | | UUGGAAGCUGAAAUG | exon: | | | |
| | | | UGAGGUUUAUAACAC | #2 | | | |
| | | | UCACAAGAAUCCUGA | | | | |
| | | | AAAAGGAUGCCAAAC | | | | |
| | | | GUACAAGAGAUAGAA | | | | |
| | | | AGmA*mC*mC | | | | |
| 1 | TCTG | 2451 | mA*mC*mA*GCUUAU | B2M | ••• | ••• | ••• |
| | | | UUGGAAGCUGAAAUG | exon: | | | |
| | | | UGAGGUUUAUAACAC | #2 | | | |
| | | | UCACAAGAAUCCUGA | | | | |
| | | | AAAAGGAUGCCAAAC | | | | |
| | | | CUGGAUGACGUGAGU | | | | |
| | | | AAmA*mC*mC | | | | |

RNA Modification: “*” represents a phosphorothioate bond between the nucleotides, “m” denotes a 2′-OMe modification.
Magnitude of data: “•••” represents a value >40, “••” represents a value between ≤40 and ≥20, “•” represents a value <20.

### Example 17. Indel Generation in Eukaryotic Cells with CasM.265466 and Guides Targeting TRAC

[0406] Guides targeting exon 1, exon 2 and exon 3 of TRAC were tested with Cas 265466 (SEQ ID NO: 2435) for the ability to produce indels in primary T Cells. 33 modified guide RNA sequences (i.e., a phosphorothioate bond between the nucleotides, a 2′-OMe modification) directed to various target sequences were tested and their ability to introduce indels was measured. Briefly, about 30×10⁶ T cells were electroporated with a mixture of mRNA of the Cas 265466 (5 μg) and different guides (500 μmol). The transfected cells were incubated for ˜72 hours to allow for indel formation followed by DNA extraction.

[0407] After the 72-hour incubation, a portion of the cells were incubated with a Live/Dead cell stain and a CD3 antibody for fluorescence-activated cell sorting (FACS) analysis. Indels were detected by next generation sequencing (NGS) of PCR amplicons at the targeted loci 3 days post-transfection. Indel percentage was calculated as the fraction of sequencing reads containing insertions or deletions relative to an unedited reference sequence. The effector proteins Cas9 and Cas 12a were used as a positive control. The results are summarized in TABLE 30. An analysis of the results indicates that the effector protein CasM.265466 mRNA and the guides targeting TRAC gene can be used for editing the gene.

TABLE 30
Exemplary modified guides for TRAC editing in T cells

| | | | | | FACS | |
|---|---|---|---|---|---|---|
| Effector | | | | | Analysis | Seq. |
| Protein | 5′ | gRNA | | | %-ve | Analysis |
| SEQ ID | PAM | SEQ ID | | Target | Cells | % Indels |
| NO | Seq | NO: | RNA Modification | Gene | (3 days) | (3 days) |
| 1 | TGTG | 2452 | mA*mC*mA*GCUUAUU | TRAC | ••• | ••• |
| | | | UGGAAGCUGAAAUGUG | exon: | | |
| | | | AGGUUUAUAACACUCA | #1 | | |
| | | | CAAGAAUCCUGAAAAA | | | |
| | | | GGAUGCCAAACUCACA | | | |
| | | | AAGUAAGGAUUCmU*m | | | |
| | | | G*mA | | | |
| 1 | TCTA | 2453 | mA*mC*mA*GCUUAUU | TRAC | •• | ••• |
| | | | UGGAAGCUGAAAUGUG | exon: | | |
| | | | AGGUUUAUAACACUCA | #1 | | |
| | | | CAAGAAUCCUGAAAAA | | | |
| | | | GGAUGCCAAACUGGAC | | | |
| | | | UUCAAGAGCAACmA*m | | | |
| | | | G*mU | | | |
| 1 | TTTG | 2454 | mA*mC*mA*GCUUAUU | TRAC | • | • |
| | | | UGGAAGCUGAAAUGUG | exon: | | |
| | | | AGGUUUAUAACACUCA | #1 | | |
| | | | CAAGAAUCCUGAAAAA | | | |
| | | | GGAUGCCAAACAUUCU | | | |
| | | | CAAACAAAUGUGmU*m | | | |
| | | | C*mA | | | |
| 1 | TCTG | 2455 | mA*mC*mA*GCUUAUU | TRAC | •• | •• |
| | | | UGGAAGCUGAAAUGUG | exon: | | |
| | | | AGGUUUAUAACACUCA | #1 | | |
| | | | CAAGAAUCCUGAAAAA | | | |
| | | | GGAUGCCAAACACUUU | | | |
| | | | GCAUGUGCAAACmG*m | | | |
| | | | C*mC | | | |
| 1 | TGTG | 2456 | mA*mC*mA*GCUUAUU | TRAC | • | •• |
| | | | UGGAAGCUGAAAUGUG | exon: | | |
| | | | AGGUUUAUAACACUCA | #1 | | |
| | | | CAAGAAUCCUGAAAAA | | | |
| | | | GGAUGCCAAACCAAAC | | | |
| | | | GCCUUCAACAACmA*m | | | |
| | | | G*mC | | | |
| 1 | TGTG | 2457 | mA*mC*mA*GCUUAUU | TRAC | •• | ••• |
| | | | UGGAAGCUGAAAUGUG | exon: | | |
| | | | AGGUUUAUAACACUCA | #1 | | |
| | | | CAAGAAUCCUGAAAAA | | | |
| | | | GGAUGCCAAACUAUAU | | | |
| | | | CACAGACAAAACmU*m | | | |
| | | | G*mU | | | |
| 1 | TCTA | 2458 | mA*mC*mA*GCUUAUU | TRAC | •• | ••• |
| | | | UGGAAGCUGAAAUGUG | exon: | | |
| | | | AGGUUUAUAACACUCA | #1 | | |
| | | | CAAGAAUCCUGAAAAA | | | |
| | | | GGAUGCCAAACAAUCC | | | |
| | | | AGUGACAAGUCUmG*m | | | |
| | | | U*mC | | | |
| 1 | TCTG | 2459 | mA*mC*mA*GCUUAUU | TRAC | •• | ••• |
| | | | UGGAAGCUGAAAUGUG | exon: | | |
| | | | AGGUUUAUAACACUCA | #1 | | |
| | | | CAAGAAUCCUGAAAAA | | | |
| | | | GGAUGCCAAACAUGUG | | | |
| | | | UAUAUCACAGACmA*m | | | |
| | | | A*mA | | | |
| 1 | TTTG | 2460 | mA*mC*mA*GCUUAUU | TRAC | •• | • |
| | | | UGGAAGCUGAAAUGUG | exon: | | |
| | | | AGGUUUAUAACACUCA | #1 | | |
| | | | CAAGAAUCCUGAAAAA | | | |
| | | | GGAUGCCAAACCAUGU | | | |
| | | | GCAAACGCCUUCmA*m | | | |
| | | | A*mC | | | |
| 1 | TATA | 2461 | mA*mC*mA*GCUUAUU | TRAC | ••• | ••• |
| | | | UGGAAGCUGAAAUGUG | exon: | | |
| | | | AGGUUUAUAACACUCA | #1 | | |
| | | | CAAGAAUCCUGAAAAA | | | |
| | | | GGAUGCCAAACUCACA | | | |
| | | | GACAAAACUGUGmC*m | | | |
| | | | U*mA | | | |
| 1 | TGTA | 2462 | mA*mC*mA*GCUUAUU | TRAC | ••• | ••• |
| | | | UGGAAGCUGAAAUGUG | exon: | | |
| | | | AGGUUUAUAACACUCA | #1 | | |
| | | | CAAGAAUCCUGAAAAA | | | |
| | | | GGAUGCCAAACUAUCA | | | |
| | | | CAGACAAAACUGmU*m | | | |
| | | | G*mC | | | |
| 1 | TCTG | 2463 | mA*mC*mA*GCUUAUU | TRAC | •• | •• |
| | | | UGGAAGCUGAAAUGUG | exon: | | |
| | | | AGGUUUAUAACACUCA | #1 | | |
| | | | CAAGAAUCCUGAAAAA | | | |
| | | | GGAUGCCAAACUCUGC | | | |
| | | | CUAUUCACCGAUmU*m | | | |
| | | | U*mU | | | |
| 1 | TGTG | 2464 | mA*mC*mA*GCUUAUU | TRAC | •• | • |
| | | | UGGAAGCUGAAAUGUG | exon: | | |
| | | | AGGUUUAUAACACUCA | #1 | | |
| | | | CAAGAAUCCUGAAAAA | | | |
| | | | GGAUGCCAAACGCCUG | | | |
| | | | GAGCAACAAAUCmU*m | | | |
| | | | G*mA | | | |
| 1 | TGTA | 2465 | mA*mC*mA*GCUUAUU | TRAC | •• | ••• |
| | | | UGGAAGCUGAAAUGUG | exon: | | |
| | | | AGGUUUAUAACACUCA | #1 | | |
| | | | CAAGAAUCCUGAAAAA | | | |
| | | | GGAUGCCAAACCCAGC | | | |
| | | | UGAGAGACUCUAmA*m | | | |
| | | | A*mU | | | |
| 1 | TCTG | 2466 | mA*mC*mA*GCUUAUU | TRAC | • | • |
| | | | UGGAAGCUGAAAUGUG | exon: | | |
| | | | AGGUUUAUAACACUCA | #1 | | |
| | | | CAAGAAUCCUGAAAAA | | | |
| | | | GGAUGCCAAACCCUAU | | | |
| | | | UCACCGAUUUUGmA*m | | | |
| | | | U*mU | | | |
| 1 | TGTG | 2467 | mA*mC*mA*GCUUAUU | TRAC | •• | • |
| | | | UGGAAGCUGAAAUGUG | exon: | | |
| | | | AGGUUUAUAACACUCA | #1 | | |
| | | | CAAGAAUCCUGAAAAA | | | |
| | | | GGAUGCCAAACCUAGA | | | |
| | | | CAUGAGGUCUAUmG*m | | | |
| | | | G*mA | | | |
| 1 | TATG | 2468 | mA*mC*mA*GCUUAUU | TRAC | •• | •• |
| | | | UGGAAGCUGAAAUGUG | exon: | | |
| | | | AGGUUUAUAACACUCA | #1 | | |
| | | | CAAGAAUCCUGAAAAA | | | |
| | | | GGAUGCCAAACGACUU | | | |
| | | | CAAGAGCAACAGmU*m | | | |
| | | | G*mC | | | |
| 1 | TCTA | 2469 | mA*mC*mA*GCUUAUU | TRAC | • | • |
| | | | UGGAAGCUGAAAUGUG | exon: | | |
| | | | AGGUUUAUAACACUCA | #1 | | |
| | | | CAAGAAUCCUGAAAAA | | | |
| | | | GGAUGCCAAACGCACA | | | |
| | | | GUUUUGUCUGUGmA*m | | | |
| | | | U*mA | | | |
| 1 | TTTG | 2470 | mA*mC*mA*GCUUAUU | TRAC | • | • |
| | | | UGGAAGCUGAAAUGUG | exon: | | |
| | | | AGGUUUAUAACACUCA | #1 | | |
| | | | CAAGAAUCCUGAAAAA | | | |
| | | | GGAUGCCAAACAGAAU | | | |
| | | | CAAAAUCGGUGAmA*m | | | |
| | | | U*mA | | | |
| 1 | TATA | 2471 | mA*mC*mA*GCUUAUU | TRAC | •• | ••• |
| | | | UGGAAGCUGAAAUGUG | exon: | | |
| | | | AGGUUUAUAACACUCA | #1 | | |
| | | | CAAGAAUCCUGAAAAA | | | |
| | | | GGAUGCCAAACCACAU | | | |
| | | | CAGAAUCCUUACmU*m | | | |
| | | | U*mU | | | |
| 1 | TCTG | 2472 | mA*mC*mA*GCUUAUU | TRAC | •• | ••• |
| | | | UGGAAGCUGAAAUGUG | exon: | | |
| | | | AGGUUUAUAACACUCA | #1 | | |
| | | | CAAGAAUCCUGAAAAA | | | |
| | | | GGAUGCCAAACUGAUA | | | |
| | | | UACACAUCAGAAmU*m | | | |
| | | | C*mC | | | |
| 1 | TGTG | 2473 | mA*mC*mA*GCUUAUU | TRAC | • | •• |
| | | | UGGAAGCUGAAAUGUG | exon: | | |
| | | | AGGUUUAUAACACUCA | #1 | | |
| | | | CAAGAAUCCUGAAAAA | | | |
| | | | GGAUGCCAAACACACA | | | |
| | | | UUUGUUUGAGAAmU*m | | | |
| | | | C*mA | | | |
| 1 | TTTG | 2474 | mA*mC*mA*GCUUAUU | TRAC | • | • |
| | | | UGGAAGCUGAAAUGUG | exon: | | |
| | | | AGGUUUAUAACACUCA | #1 | | |
| | | | CAAGAAUCCUGAAAAA | | | |
| | | | GGAUGCCAAACUGACA | | | |
| | | | CAUUUGUUUGAGmA*m | | | |
| | | | A*mU | | | |
| 1 | TTTA | 2475 | mA*mC*mA*GCUUAUU | TRAC | ••• | ••• |
| | | | UGGAAGCUGAAAUGUG | exon: | | |
| | | | AGGUUUAUAACACUCA | #1 | | |
| | | | CAAGAAUCCUGAAAAA | | | |
| | | | GGAUGCCAAACGAGUC | | | |
| | | | UCUCAGCUGGUAmC*m | | | |
| | | | A*mC | | | |
| 1 | TTTG | 2476 | mA*mC*mA*GCUUAUU | TRAC | ••• | ••• |
| | | | UGGAAGCUGAAAUGUG | exon: | | |
| | | | AGGUUUAUAACACUCA | #1 | | |
| | | | CAAGAAUCCUGAAAAA | | | |
| | | | GGAUGCCAAACUUGCU | | | |
| | | | CCAGGCCACAGCmA*m | | | |
| | | | C*mU | | | |
| 1 | TTTG | 2477 | mA*mC*mA*GCUUAUU | TRAC | • | • |
| | | | UGGAAGCUGAAAUGUG | exon: | | |
| | | | AGGUUUAUAACACUCA | #1 | | |
| | | | CAAGAAUCCUGAAAAA | | | |
| | | | GGAUGCCAAACCACAU | | | |
| | | | GCAAAGUCAGAUmU*m | | | |
| | | | U*mG | | | |
| 1 | TTTG | 2478 | mA*mC*mA*GCUUAUU | TRAC | •• | •• |
| | | | UGGAAGCUGAAAUGUG | exon: | | |
| | | | AGGUUUAUAACACUCA | #1 | | |
| | | | CAAGAAUCCUGAAAAA | | | |
| | | | GGAUGCCAAACUUUGA | | | |
| | | | GAAUCAAAAUCGmG*m | | | |
| | | | U*mG | | | |
| 1 | TGTG | 2479 | mA*mC*mA*GCUUAUU | TRAC | •• | ••• |
| | | | UGGAAGCUGAAAUGUG | exon: | | |
| | | | AGGUUUAUAACACUCA | #1 | | |
| | | | CAAGAAUCCUGAAAAA | | | |
| | | | GGAUGCCAAACAUAUA | | | |
| | | | CACAUCAGAAUCmC*m | | | |
| | | | U*mU | | | |
| 1 | TCTG | 2480 | mA*mC*mA*GCUUAUU | TRAC | • | • |
| | | | UGGAAGCUGAAAUGUG | exon: | | |
| | | | AGGUUUAUAACACUCA | #1 | | |
| | | | CAAGAAUCCUGAAAAA | | | |
| | | | GGAUGCCAAACGAAUA | | | |
| | | | AUGCUGUUGUUGmA*m | | | |
| | | | A*mG | | | |
| 1 | TTTG | 2481 | mA*mC*mA*GCUUAUU | TRAC | •• | ••• |
| | | | UGGAAGCUGAAAUGUG | exon: | | |
| | | | AGGUUUAUAACACUCA | #1 | | |
| | | | CAAGAAUCCUGAAAAA | | | |
| | | | GGAUGCCAAACUCUGU | | | |
| | | | GAUAUACACAUCmA*m | | | |
| | | | G*mA | | | |
| 1 | TGTG | 2482 | mA*mC*mA*GCUUAUU | TRAC | • | •• |
| | | | UGGAAGCUGAAAUGUG | exon: | | |
| | | | AGGUUUAUAACACUCA | #2 | | |
| | | | CAAGAAUCCUGAAAAA | | | |
| | | | GGAUGCCAAACAUGUC | | | |
| | | | AAGCUGGUCGAGmA*m | | | |
| | | | A*mA | | | |
| 1 | TCTG | 2483 | mA*mC*mA*GCUUAUU | TRAC | • | •• |
| | | | UGGAAGCUGAAAUGUG | exon: | | |
| | | | AGGUUUAUAACACUCA | #3 | | |
| | | | CAAGAAUCCUGAAAAA | | | |
| | | | GGAUGCCAAACCUCAU | | | |
| | | | GACGCUGCGGCUmG*m | | | |
| | | | U*mG | | | |
| 1 | TTTA | 2484 | mA*mC*mA*GCUUAUU | TRAC | ••• | ••• |
| | | | UGGAAGCUGAAAUGUG | exon: | | |
| | | | AGGUUUAUAACACUCA | #3 | | |
| | | | CAAGAAUCCUGAAAAA | | | |
| | | | GGAUGCCAAACAUCUG | | | |
| | | | CUCAUGACGCUGmC*m | | | |
| | | | G*mG | | | |

RNA Modification: “*” represents a phosphorothioate bond between the nucleotides, “m” denotes a 2′-OMe modification.
Magnitude of data: “•••” represents a value >45, “••” represents a value between ≤45 and ≥20, “•” represents a value <20.

### Example 18. Indel Generation in Eukaryotic Cells with CasM.265466 and Guides Targeting CITTA

[0408] Guides targeting exon 1, exon 2 and exon 3 of CIITA were tested with Cas 265466 (SEQ ID NO: 2435) for the ability to produce indels in primary T Cells. 27 modified guide RNA sequences (i.e., a phosphorothioate bond between the nucleotides, a 2′-OMe modification) directed to various target sequences were tested and their ability to introduce indels was measured. Briefly, 30×10⁶ T cells were electroporated with a mixture of mRNA of the Cas 265466 (5 μg) and different guides (500 pmol The transfected cells were incubated for ˜72 hours to allow for indel formation followed by DNA extraction.

[0409] After the 72-hour incubation, indels were detected by next generation sequencing (NGS) of PCR amplicons at the targeted loci. Indel percentage was calculated as the fraction of sequencing reads containing insertions or deletions relative to an unedited reference sequence. The effector proteins Cas9 and Cas12a were used as a positive control. The results are summarized in TABLE 31. An analysis of the results indicates that the effector protein CasM.265466 mRNA and the guides targeting CIITA gene can be used for editing the gene.

TABLE 31
Exemplary modified guides for CIITA editing in T cells

| Effector | | gRNA | | | |
|---|---|---|---|---|---|
| Protein | 5′ | SEQ | | | % |
| SEQ ID | PAM | ID | | Target | Indels |
| NO: | Sec | NO: | RNA Modification | Gene | (3 days) |
| 1 | TGT | 2485 | mA*mC*mA*GCUUAUUUGGAAGCUGA | CIITA | •• |
| | G | | AAUGUGAGGUUUAUAACACUCACAAG | exon: #1 | |
| | | | AAUCCUGAAAAAGGAUGCCAAACUGC | | |
| | | | UUCUGAGCUGGGCAmU*mC*mC | | |
| 1 | TCT | 2486 | mA*mC*mA*GCUUAUUUGGAAGCUGA | CIITA | •• |
| | G | | AAUGUGAGGUUUAUAACACUCACAAG | exon: #1 | |
| | | | AAUCCUGAAAAAGGAUGCCAAACAGC | | |
| | | | UGGGCAUCCGAAGGmC*mA*mU | | |
| 1 | TGT | 2487 | mA*mC*mA*GCUUAUUUGGAAGCUGA | CIITA | • |
| | G | | AAUGUGAGGUUUAUAACACUCACAAG | exon: #1 | |
| | | | AAUCCUGAAAAAGGAUGCCAAACCUU | | |
| | | | CUGAGCUGGGCAUCmC*mG*mA | | |
| 1 | TGT | 2488 | mA*mC*mA*GCUUAUUUGGAAGCUGA | CIITA | ••• |
| | A | | AAUGUGAGGUUUAUAACACUCACAAG | exon: #1 | |
| | | | AAUCCUGAAAAAGGAUGCCAAACGGA | | |
| | | | AUCCCAGCCAGGCAmG*mC*mA | | |
| 1 | TGT | 2489 | mA*mC*mA*GCUUAUUUGGAAGCUGA | CIITA | ••• |
| | G | | AAUGUGAGGUUUAUAACACUCACAAG | exon: #1 | |
| | | | AAUCCUGAAAAAGGAUGCCAAACUAG | | |
| | | | GAAUCCCAGCCAGGmC*mA*mG | | |
| 1 | TCT | 2490 | mA*mC*mA*GCUUAUUUGGAAGCUGA | CIITA | ••• |
| | G | | AAUGUGAGGUUUAUAACACUCACAAG | exon: #1 | |
| | | | AAUCCUGAAAAAGGAUGCCAAACGCA | | |
| | | | GCCCCUCCUCGUGCmC*mC*mU | | |
| 1 | TCT | 2491 | mA*mC*mA*GCUUAUUUGGAAGCUGA | CIITA | •• |
| | G | | AAUGUGAGGUUUAUAACACUCACAAG | exon: #1 | |
| | | | AAUCCUGAAAAAGGAUGCCAAACACA | | |
| | | | GGUAGGACCCAGCAmG*mG*mG | | |
| 1 | TCT | 2492 | mA*mC*mA*GCUUAUUUGGAAGCUGA | CIITA | •• |
| | A | | AAUGUGAGGUUUAUAACACUCACAAG | exon: #2 | |
| | | | AAUCCUGAAAAAGGAUGCCAAACUGA | | |
| | | | CCAGAUGGACCUGGmC*mU*mG | | |
| 1 | TCT | 2493 | mA*mC*mA*GCUUAUUUGGAAGCUGA | CIITA | • |
| | A | | AAUGUGAGGUUUAUAACACUCACAAG | exon: #2 | |
| | | | AAUCCUGAAAAAGGAUGCCAAACCCA | | |
| | | | CUUCUAUGACCAGAmU*mG*mG | | |
| 1 | TAT | 2494 | mA*mC*mA*GCUUAUUUGGAAGCUGA | CIITA | |
| | G | | AAUGUGAGGUUUAUAACACUCACAAG | exon: #2 | • |
| | | | AAUCCUGAAAAAGGAUGCCAAACACC | | |
| | | | AGAUGGACCUGGCUmG*mG*mA | | |
| 1 | TGT | 2495 | mA*mC*mA*GCUUAUUUGGAAGCUGA | CIITA | • |
| | G | | AAUGUGAGGUUUAUAACACUCACAAG | exon: #2 | |
| | | | AAUCCUGAAAAAGGAUGCCAAACCCA | | |
| | | | CCAUGGAGUUGGGGmC*mC*mC | | |
| 1 | TGT | 2496 | mA*mC*mA*GCUUAUUUGGAAGCUGA | CIITA | • |
| | G | | AAUGUGAGGUUUAUAACACUCACAAG | exon: #2 | |
| | | | AAUCCUGAAAAAGGAUGCCAAACCCU | | |
| | | | CUACCACUUCUAUGmA*mC*mC | | |
| 1 | TCT | 2497 | mA*mC*mA*GCUUAUUUGGAAGCUGA | CIITA | •• |
| | A | | AAUGUGAGGUUUAUAACACUCACAAG | exon: #2 | |
| | | | AAUCCUGAAAAAGGAUGCCAAACGGG | | |
| | | | GCCCCAACUCCAUGmG*mU*mG | | |
| 1 | TCT | 2498 | mA*mC*mA*GCUUAUUUGGAAGCUGA | CIITA | • |
| | G | | AAUGUGAGGUUUAUAACACUCACAAG | exon: #2 | |
| | | | AAUCCUGAAAAAGGAUGCCAAACGUC | | |
| | | | AUAGAAGUGGUAGAmG*mG*mC | | |
| 1 | TGT | 2499 | mA*mC*mA*GCUUAUUUGGAAGCUGA | CIITA | •• |
| | G | | AAUGUGAGGUUUAUAACACUCACAAG | exon: #3 | |
| | | | AAUCCUGAAAAAGGAUGCCAAACACA | | |
| | | | UGGAAGGUGAUGAAmG*mA*mG | | |
| 1 | TGT | 2500 | mA*mC*mA*GCUUAUUUGGAAGCUGA | CIITA | •• |
| | G | | AAUGUGAGGUUUAUAACACUCACAAG | exon: #3 | |
| | | | AAUCCUGAAAAAGGAUGCCAAACUGA | | |
| | | | CAUGGAAGGUGAUGmA*mA*mG | | |
| 1 | TAT | 2501 | mA*mC*mA*GCUUAUUUGGAAGCUGA | CIITA | N/A |
| | G | | AAUGUGAGGUUUAUAACACUCACAAG | exon: #4 | |
| | | | AAUCCUGAAAAAGGAUGCCAAACUCU | | |
| | | | UCCAGGACUCCCAGmC*mU*mG | | |

RNA Modification: “*” represents a phosphorothioate bond between the nucleotides, “m” denotes a 2′-OMe modification.
Magnitude of data: “•••” represents a value >60, “••” represents a value between ≤60 and ≥30, “•” represents a value <30.

### Example 19. Gene Editing of B2M, TRAC or CIITA

[0410] Guides targeting B2M, TRAC, or CIITA gene are tested with Cas 265466 (SEQ ID NO: 2435) for the ability to produce indels in eukaryotic cells. Briefly, eukaryotic cells are delivered with a combination of mRNA or gene encoding Cas 265466 and a gRNAs or a nucleic acid encoding the gRNAs, wherein the gRNA comprises a handle sequence and any one of the spacer sequence recited in TABLE 32, TABLE 33, and TABLE 34. The handle sequence comprises a nucleotide sequence of ACAGCUUAUUUGGAAGCUGAAAUGUGAGGUUUAUAACACUCACAAGAAUCCUGAAAAA GGAUGCCAAAC (SEQ ID NO: 2522) or mA*mC*mA*GCUUAUUUGGAAGCUGAAAUGUGAGGUUUAUAACACUCACAAGAAUCCUG AAAAAGGAUGCCAAAC (SEQ ID NO: 2523). The CAS 265466 protein (SEQ ID NO: 2435) and the gRNA targeting B2M, TRAC, or CIITA gene forms an RNP complex that recognizes a specific 5′ PAM sequence as identified in TABLE 32, TABLE 33, and TABLE 34.

TABLE 32
CasM.265466 paired with various gRNA
comprising spacer sequences targeting
B2M gene

| Effector | | | |
|---|---|---|---|
| Protein | | 5′ | |
| SEQ ID | | PAM | Target |
| NO | Spacer SEQ ID NO | Seq | Gene |
| 2435 | 1626, 1633, 1634, 1635, 1638, | TGTG | B2M |
| | 1647, 1673, 1674, 1683 | | |
| 2435 | 1627, 1636, 1640, 1641, 1644, | TCTG | B2M |
| | 1649, 1665, 1672, 1675 | | |
| 2435 | 1639, 1628, 1659, 1663, 1677, | TGTA | B2M |
| | 1686 | | |
| 2435 | 1629, 1645, 1654, 1676, 1678, | TCTA | B2M |
| | 1691 | | |
| 2435 | 1630, 1651, 1652, 1658, 1661, | TTTA | B2M |
| | 1669, 1670, 1681, 1682, 1684 | | |
| 2435 | 1632, 1631, 1642, 1657, 1680, | TATG | B2M |
| | 1687 | | |
| 2435 | 1375, 1637, 1643, 1646, 1648, | TTTG | B2M |
| | 1650, 1653, 1655, 1662, 1667, | | |
| | 1685, 1689, 1692 | | |
| 2435 | 1656, 1660, 1664, 1666, 1668, | TATA | B2M |
| | 1671, 1679, 1688, 1690, 1693, | | |
| | 1694 | | |

TABLE 33
CasM.265466 paired with various gRNA
comprising spacer sequences targeting
TRAC gene

| Effector | | | |
|---|---|---|---|
| Protein | | 5′ | |
| SEQ ID | | PAM | Target |
| NO | Spacer SEQ ID NO | Seq | Gene |
| 2435 | 1962, 1966, 1967, 1974, 1977, | TGTG | TRAC |
| | 1983, 1989, 1992, 1995, 1997, | | |
| | 2000, 2005, 2016, 2017 | | |
| 2435 | 1963, 1968, 1979, 2008 | TCTA | TRAC |
| 2435 | 1964, 1970, 1980, 1984, 1986, | TTTG | TRAC |
| | 1987, 1988, 1991, 2014, 2019 | | |
| 2435 | 1965, 1969, 1973, 1976, 1982, | TCTG | TRAC |
| | 1990, 1993, 1996, 1998, 1999, | | |
| | 2003, 2009, 2011, 2012, 2013, | | |
| | 2015, 2018 | | |
| 2435 | 1971, 1981 | TATA | TRAC |
| 2435 | 1972, 1975, 2001, 2002, 2006 | TGTA | TRAC |
| 2435 | 1978, 2004, 2010 | TATG | TRAC |
| 2435 | 1985, 1994, 2007 | TTTA | TRAC |

TABLE 34
CasM.265466 paired with various gRNA
comprising spacer sequences targeting
CIITA gene

| Effector | | | |
|---|---|---|---|
| Protein | | 5′ | |
| SEQ ID | | PAM | Target |
| NO | Spacer SEQ ID NO | Seq | Gene |
| 2435 | 1754, 1756, 1758, 1764, | TGTG | CIITA |
| | 1765, 1768, 1769 | | |
| 2435 | 1755, 1759, 1760, 1767 | TCTG | CIITA |
| 2435 | 1757 | TGTA | CIITA |
| 2435 | 1761, 1762, 1766 | TCTA | CIITA |
| 2435 | 1763, 1770 | TATG | CIITA |

[0411] The cells are incubated for about 48 hours to 96 hours to allow indel formation. Indels are detected by next generation sequencing of PCR amplicons at the targeted loci and indel percentage is calculated as the fraction of sequencing reads containing insertions or deletions relative to an unedited reference sequence.

### Example 20. Determining Ability of CasM.265466 to Generate Indels in T Cells

[0412] A dose titration for CasM.265466 mRNA and sgRNAs was performed to improve indel formation in T cells. Briefly, sgRNAs having a handle sequence of SEQ ID NO: 2523 and a spacer sequence of each of SEQ ID NO: 2439, 2448, and 2450 were dose titrated with mRNA encoding Cas 265466 (SEQ ID NO: 2435) to determine gene editing efficiency at different doses following a similar protocol as described in Example 16 but with different amounts of sgRNA and Cas 265466 effector mRNA. Specifically, sgRNAs having the spacer sequences of each of SEQ ID NO: 2439, 2448, and 2450 were electroporated with Cas 265466 mRNA in the following conditions: 1) 5 μg Cas 265466 mRNA and 500 pmol sgRNA; 2) 10 μg Cas 265466 mRNA and 500 pmol sgRNA; 3) 10 μg Cas 265466 mRNA and 1000 pmol sgRNA; 4) 20 μg Cas 265466 mRNA and 500 pmol sgRNA; and 5) 20 μg Cas 265466 mRNA and 1000 pmol sgRNA. The T cells were electroporated with the combination and incubated for about 72 hours. Indels were detected by flow cytometry (FACS) using B2M antibody and next generation sequencing (NGS) of PCR amplicons at the targeted loci 3 days post electroporation. The results of the FACS analysis are shown in FIG. 18. The Y-axis shows the percent B2M negative cells. The X-axis shows the different sgRNAs. The conditions indicated above are presented left to right on the graphs for each sgRNA. Indel percentage was calculated as the fraction of sequencing reads containing insertions or deletions relative to an unedited reference sequence which are summarized in TABLE 35. An analysis of results demonstrate successful editing of B2M gene in the T cells by CasM.265466 and sgRNA at a range of concentration ratios.

TABLE 35
Indel Formation using CasM.265466
mRNA paired with various sgRNA in T cells

| | mRNA | sgRNA | Spacer SEQ | % |
|---|---|---|---|---|
| No. | Dose (ng) | Dose (ng) | ID NO: | INDELS |
| 1 | 5 | 500 | 2439 | •• |
| | | | 2448 | •• |
| | | | 2450 | ••• |
| 2 | 10 | 500 | 2439 | •• |
| | | | 2448 | •• |
| | | | 2450 | ••• |
| 3 | 10 | 1000 | 2439 | •• |
| | | | 2448 | •• |
| | | | 2450 | ••• |
| 4 | 20 | 500 | 2439 | •• |
| | | | 2448 | •• |
| | | | 2450 | ••• |
| 5 | 20 | 1000 | 2439 | •• |
| | | | 2448 | •• |
| | | | 2450 | •• |

% Indels represents 3 day post editing NGS Indel percentage data. Magnitude of Indel percentage data: “•••” represents a value over 80, “••” represents a value under 80 but over 50, “•” represents a value under 50.

### Example 21. Dose titration for TRAC editing

[0413] A dose titration for CasM.265466 mRNA and sgRNAs was performed to improve indel formation in T cells. Briefly, sgRNAs having a handle sequence of SEQ ID NO: 2523 and a spacer sequence of each of SEQ ID NO: 2452, 2462 and 2476 were dose titrated with mRNA encoding Cas 265466 (SEQ ID NO: 2435) to determine gene editing efficiency at different doses following a similar protocol as described in Example 17 but with different amounts of sgRNA and Cas 265466 effector mRNA. Specifically, sgRNAs having each of spacer sequences of SEQ ID NO: 2452, 2462 and 2476 were electroporated with Cas 265466 mRNA in the following conditions: 1) 5 μg Cas 265466 mRNA and 500 pmol sgRNA; 2) 5 μg Cas 265466 mRNA and 1000 pmol sgRNA; 3) 10 μg Cas 265466 mRNA and 500 pmol sgRNA; and 4) 10 μg Cas 265466 mRNA and 1000 pmol sgRNA. The results of the sequence analysis are shown in FIG. 10. The Y-axis shows the percent indels in the TRAC gene. The X-axis shows the different sgRNAs, and NT indicates non-treated. The conditions indicated above are presented left to right on the graphs for each sgRNA. The sequencing graph shown in FIG. 19, shows of the percent indels of TRAC. An analysis of FIG. 19 indicates that the 5 μg Cas 265466 mRNA in combination with 500 pmol sgRNA having the spacer sequences of each of SEQ ID NO: 2452, 2462 and 2476 had about 80% indels. The analysis further suggests that the 5 μg Cas 265466 mRNA and 500 pmol sgRNA condition produced the highest amount of editing.

### Example 22. Dose Titration for CIITA Editing

[0414] A dose titration for CasM.265466 mRNA and sgRNAs was performed to improve indel formation in T cells. Briefly, sgRNAs having a handle sequence of SEQ ID NO: 2523 and a spacer sequence of each of SEQ ID NO: 2488, 2489 and 2490 were dose titrated with mRNA encoding Cas 265466 (SEQ ID NO: 2435) to determine gene editing efficiency at different doses following a similar protocol as described in Example 18 but with different amounts of sgRNA and Cas 265466 effector mRNA. Briefly, sgRNAs having each of spacer sequences of SEQ ID NO: 2488, 2489 and 2490 were electroporated with Cas 265466 mRNA in the following conditions: 1) 5 μg Cas 265466 mRNA and 500 pmol sgRNA; 2) 5 μg Cas 265466 mRNA and 1000 pmol sgRNA; 3) 10 μg Cas 265466 mRNA and 500 pmol sgRNA; and 4) 10 μg Cas 265466 mRNA and 1000 pmol sgRNA. The results of the sequence analysis are shown in FIG. 20. The Y-axis shows the percent indels in the CIITA gene. The X-axis shows the different sgRNAs, and NT indicates non-treated. The conditions indicated above are presented left to right on the graphs for each sgRNA. The sequencing graph shown in FIG. 20, shows of the percent indels of CIITA. An analysis of FIG. 20 indicates that The results show the: 5 μg Cas 265466 mRNA and 1000 pmol sgRNA; 10 μg Cas 265466 mRNA and 500 pmol sgRNA; and 10 μg Cas 265466 mRNA and 1000 pmol sgRNA conditions produced the highest amount of editing.

### Example 23. B2M editing in NK cells

[0415] B2M guides targeting exon 2 of B2M were tested with Cas 265466 for the ability to produce indels in primary NK Cells. Briefly, the NK cells were electroporated with a mixture of mRNA encoding the Cas nuclease (SEQ ID NO: 2435) and gRNA of different guides (SEQ ID NO: 2439 and 2448) were mixed and then electroporated. 5 μg of Cas 265466 was added for the assay and 500 pmol of gRNA was added for the assay. Different electroporation conditions were used to determine the highest efficiency for NK cell electroporation and are described below. Individual gRNA were used with the effector proteins. After electroporation, the cells were incubated at 37° C. and 5% CO2 for 72 hours.

[0416] After the 72-hour incubation, cells were analyzed for indels in B2M. FIG. 21 shows sequencing data at Day 3 showing the percent indels in B2M for the Cas 265466 and gRNA with different electroporation conditions. The Y-axis shows the percent of indels. The X-axis shows the different gRNAs, and NT indicates non-treated. The gRNAs and Cas 265466 were electroporated with different conditions. Briefly, the sgRNAs were electroporated with Cas 265466 mRNA in the following conditions: 1) 1600 Volts (V) for 20 milliseconds (ms) with 1 pulse; 2) 1700 V for 20 ms with 1 pulse; 3) 1300 V for 30 ms with 1 pulse; 4) 1300 V for 30 ms with 2 pulses; and 5) 1850 V for 10 ms with 2 pulses. The conditions indicated above are presented left to right on the graph for each gRNA. The conditions of 1) 1600 V for 20 ms with 1 pulse and 5) 1850 V for 10 ms with 2 pulses produced the highest percentage of indels in guides having nucleic acid of SEQ ID NO: 2439 and 2448. The condition of 1) 1600 V for 20 ms with 1 pulse produced about 20-30% indels in B2M of the primary NK cells with either guides having nucleic acid of SEQ ID NO: 2439 or 2448, and the condition of 5) 1850 V for 10 ms with 2 pulses produced about 20% indels in B2M of the primary NK cells. The results show Cas 265466 with different guide constructs can edit B2M in NK cells.

### Example 24. Gene Editing of Primary T Cells with scAAV Vector Encoding CasM.265466 and Guide RNA

[0417] scAAV plasmid constructs were tested for their ability to produce indels in B2M of primary T cells. Briefly, a scAAV plasmid was constructed to contain a transgene between its ITRs, the transgene providing or encoding, in a 5′ to 3′ direction, a U6 promoter, a guide RNA, an EFS promoter, a Cas effector protein, and a SV40 poly A tail. The EFS promoter was EFS1, EFS2, or EFS3, wherein EFS1 promoter construct refers to the scAAV plasmid encoding the guide RNA having SEQ ID NO: 2439, EFS2 promoter construct refers to the scAAV plasmid encoding the guide RNA having SEQ ID NO: 2450, and EFS3 promoter construct refers to the scAAV plasmid encoding the guide RNA having SEQ ID NO: 2448. The Cas effector protein was Cas 265466 (SEQ ID NO: 2435). The guide RNA had a nucleotide sequence that targets B2M gene. The scAAV vector was expressed with supporting plasmids to produce an adeno-associated virus (AAV). Activated primary T cells were transduced with the AAV. DNA was isolated from the infected cells post transduction. An indel in B2M caused by the guide nucleic acid was confirmed by sequencing. The scAAV results are summarized in FIG. 22, which shows the percent indels in B2M on the Y-axis and the different scAAV constructs varying in the EFS promoter on the X-axis. NT on the X-axis indicates non-treated. The EFS3 promoter construct produced the highest percent (6%) of indels in B2M. The results indicate that AAV encoding Cas 265466 and an sgRNA can be used to edit genes in primary T cells.

### Example 25. Gene editing of eukaryotic cells with scAAV vector encoding CasM.19952 and guide RNA

[0418] An scAAV vector is constructed to contain a transgene between its ITRs, the transgene providing or encoding, in a 5′ to 3′ direction, a U6 promoter, a guide RNA, an EFS promoter, a Cas effector protein, and a SV40 poly A tail as illustrated in FIG. 23. The Cas effector comprises a sequence of SEQ ID NO: 23. The guide RNA that are used for gene editing includes SEQ ID NOs: 2502-2511. The AAV vector is expressed with supporting plasmids to produce an adeno-associated virus (AAV). Eukaryotic cells are contacted with the AAV for 24 hours. After about 96 hours, post AAV contact, DNA or RNA is isolated from the infected eukaryotic cells. An indel caused by the guide nucleic acid is confirmed by sequencing and/or Q-PCR. TABLE 36 recites amplicons (SEQ ID NOs: 2512-2521) that are sequenced for measuring indel activity with a specific guide RNA.

TABLE 36
Amplicon Sequences used with sgRNA in
Primary T Cells

| sgRNA (SEQ ID NO:) | Amplicon sequence |
|---|---|
| UGGGGCAGUUGGUUGCCC | ACACAGACACCATCAACTGCGACCAGTTC |
| UUAGCCUGAGGCAUUUAU | AGCAGGCTGTTGTGTGACATGGAAGGTGA |
| UGCACUCGGGAAGUACCA | TGAAGAGACCAGGGAGGCTTATGCCAATA |
| UUUCUCAGAAAUGGUACA | TCGGTGAGGAAGCACCTGAGCCCAGAAAA |
| UCCAACGUGAGGAAGCAC | GGACAATCAAGGGCAAGAGTTCTTTGCTG |
| CUGAGCCC (SEQ ID | CCACTTGTCAATATCACCCATTCATCATG |
| NO: 2502) | AGCCACGT (SEQ ID NO: 2512) |
| UGGGGCAGUUGGUUGCCC | TCTAGGGATGGTGGCTTCTGGAAGGCTGA |
| UUAGCCUGAGGCAUUUAU | CCATGCACAGGCCTCCAATCCCTCCCCCT |
| UGCACUCGGGAAGUACCA | GGCCTCTGTTTCCGACAGCTTGTACAATA |
| UUUCUCAGAAAUGGUACA | ACTGCATCTGCGACGTGGGAGCCGAGAGC |
| UCCAACCAGAUGCAGUUA | TTGGCTCGTGTGCTTCCGGACATGGTGTC |
| UUGUACAA (SEQ ID | CCTCCGGGTGATGGAGTGAGTGTGGGAGT |
| NO: 2503) | CTGGGCGGTGGGTGGCTCAGCCCGGGGTG |
| | GGAGACACTGAAGTCTCTCCCTGGTGTC |
| | (SEQ ID NO: 2513) |
| UGGGGCAGUUGGUUGCCC | GGATGGGAAGGGTCAGATGGCCCCAGGAC |
| UUAGCCUGAGGCAUUUAU | GCTAGCTGATGGCCCCCATCTGATTCCAC |
| UGCACUCGGGAAGUACCA | CTGCAGCCTGGATGCGCTGAGTGAGAACA |
| UUUCUCAGAAAUGGUACA | AGATCGGGGACGAGGGTGTCTCGCAGCTC |
| UCCAACCAGCUCUCAGCC | TCAGCCACCTTCCCCCAGCTGAAGTCCTT |
| ACCUUCCC (SEQ ID | GGAAACCCTCAAGTGAGTGAGCTGGGCCT |
| NO: 2504) | GCCCTTCCTGCTGAATCGGGCCCCCAAAG |
| | TCCGGCTGACTTTTTCAAAATTAATTTAA |
| | ATTTGTTTTTTTAGACAAGGGCTCGCTG |
| | (SEQ ID NO: 2514) |
| UGGGGCAGUUGGUUGCCC | GCCCAAGAACTAGGAGGTCTGGGGTGGGA |
| UUAGCCUGAGGCAUUUAU | GAGTCAGCCTGCTCTGGATGCTGAAAGAA |
| UGCACUCGGGAAGUACCA | TGTCTGTTTTTCCTTTTAGAAAGTTCCTG |
| UUUCUCAGAAAUGGUACA | TGATGTCAAGCTGGTCGAGAAAAGCTTTG |
| UCCAACACCAGCUUGACA | AAACAGGTAAGACAGGGGTCTAGCCTGGG |
| UCACAGGA (SEQ ID | TTTGCACAGGATTGCGGAAGTGATGAACC |
| NO: 2505) | CGCAATAACCCTGCCTGGATGAGGGAGTG |
| | GGAAGAAATTAGTAGATGTGGGAATGAAT |
| | GATGAGGAATGGAAACAGCGGTT (SEQ |
| | ID NO: 2515) |
| UGGGGCAGUUGGUUGCCC | AGGGGATATGCACAGAAGCTGCAAGGGAC |
| UUAGCCUGAGGCAUUUAU | AGGAGGTGCAGGAGCTGCAGGCCTCCCCC |
| UGCACUCGGGAAGUACCA | ACCCAGCCTGCTCTGCCTTGGGGAAAACC |
| UUUCUCAGAAAUGGUACA | GTGGGTGTGTCCTGCAGGCCATGCAGGCC |
| UCCAACGAACCCAAUCAC | TGGGACATGCAAGCCCATAACCGCTGTGG |
| UGACAGGU (SEQ ID | CCTCTTGGTTTTACAGATACGAACCTAAA |
| NO: 2506) | CTTTCAAAACCTGTCAGTGATTGGGTTCC |
| | GAATCCTCCTCCTGAAAGTGGCCGGGTTT |
| | AATCTGCTCATGACGCTGC (SEQ ID |
| | NO: 2516) |
| UGGGGCAGUUGGUUGCCC | AGGGGATATGCACAGAAGCTGCAAGGGAC |
| UUAGCCUGAGGCAUUUAU | AGGAGGTGCAGGAGCTGCAGGCCTCCCCC |
| UGCACUCGGGAAGUACCA | ACCCAGCCTGCTCTGCCTTGGGGAAAACC |
| UUUCUCAGAAAUGGUACA | GTGGGTGTGTCCTGCAGGCCATGCAGGCC |
| UCCAACUAUCUGUAAAAC | TGGGACATGCAAGCCCATAACCGCTGTGG |
| CAAGAGGC (SEQ ID | CCTCTTGGTTTTACAGATACGAACCTAAA |
| NO: 2507) | CTTTCAAAACCTGTCAGTGATTGGGTTCC |
| | GAATCCTCCTCCTGAAAGTGGCCGGGTTT |
| | AATCTGCTCATGACGCTGC (SEQ ID |
| | NO: 2517) |
| UGGGGCAGUUGGUUGCCC | AATATAAGTGGAGGCGTCGCGCTGGCGGG |
| UUAGCCUGAGGCAUUUAU | CATTCCTGAAGCTGACAGCATTCGGGCCG |
| UGCACUCGGGAAGUACCA | AGATGTCTCGCTCCGTGGCCTTAGCTGTG |
| UUUCUCAGAAAUGGUACA | CTCGCGCTACTCTCTCTTTCTGGCCTGGA |
| UCCAACCGCUACUCUCUC | GGCTATCCAGCGTGAGTCTCTCCTACCCT |
| UUUCUGGC (SEQ ID | CCCGCTCTGGTCCTTCCTCTCCCGCTCTG |
| NO: 2508) | CACCCTCTGTGGCCCTCGCTGTGCTCTCT |
| | CGCTCCGTGACTTCCCTTCTCC (SEQ |
| | ID NO: 2518) |
| UGGGGCAGUUGGUUGCCC | CCCAAGTGAAATACCCTGGCAATATTAAT |
| UUAGCCUGAGGCAUUUAU | GTGTCTTTTCCCGATATTCCTCAGGTACT |
| UGCACUCGGGAAGUACCA | CCAAAGATTCAGGTTTACTCACGTCATCC |
| UUUCUCAGAAAUGGUACA | AGCAGAGAATGGAAAGTCAAATTTCCTGA |
| UCCAACGAUGGAUGAAAC | ATTGCTATGTGTCTGGGTTTCATCCATCC |
| CCAGACAC (SEQ ID | GACATTGAAGTTGACTTACTGAAGAATGG |
| NO: 2509) | AGAGAGAATTGAAAAAGTGGAGCATTCAG |
| | ACTTGTCTTTCAGCAAGGACTGGTCTTTC |
| | TATCTCTTGTACTACACTGAATTCACCCC |
| | CACTG (SEQ ID NO: 2519) |
| UGGGGCAGUUGGUUGCCC | AGCCTATTCTGCCAGCCTTATTTCTAACC |
| UUAGCCUGAGGCAUUUAU | ATTTTAGACATTTGTTAGTACATGGTATT |
| UGCACUCGGGAAGUACCA | TTAAAAGTAAAACTTAATGTCTTCCTTTT |
| UUUCUCAGAAAUGGUACA | TTTTCTCCACTGTCTTTTTCATAGATCGA |
| UCCAACAUCUAUGAAAAA | GACATGTAAGCAGCATCATGGAGGTAAGT |
| GACAGUGG (SEQ ID | TTTTGACCTTGAGAAAATGTTTTTGTTTC |
| NO: 2510) | ACTGTCCTGAGGACTATTTATAGACAGCT |
| | CTAACATGATAACCCTCACTATGTGGAGA |
| | ACAT (SEQ ID NO: 2520) |
| UGGGGCAGUUGGUUGCCC | CCTCTCTCTAACCTGGCACTGCGTCGCTG |
| UUAGCCUGAGGCAUUUAU | GCTTGGAGACAGGTGACGGTCCCTGCGGG |
| UGCACUCGGGAAGUACCA | CCTTGTCCTGATTGGCTGGGCACGCGTTT |
| UUUCUCAGAAAUGGUACA | AATATAAGTGGAGGCGTCGCGCTGGCGGG |
| UCCAACCUCCGUGGCCUU | CATTCCTGAAGCTGACAGCATTCGGGCCG |
| AGCUGUGC (SEQ ID | AGATGTCTCGCTCCGTGGCCTTAGCTGTG |
| NO: 2511) | CTCGCGCTACTCTCTCTTTCTGGCCTGGA |
| | GGCTATCCAGCGTGAGTCTCTCCTACCCT |
| | C (SEQ ID NO: 2521) |

### Example 26. Gene Editing of Primary T Cells with scAAV Vector Encoding CasM.19952 and Guide RNA

[0419] A dose response experiment for scAAV plasmid for testing its ability to produce indels in primary T cells was conducted. Briefly, a scAAV plasmid was constructed to contain a transgene between its ITRs, the transgene providing or encoding, in a 5′ to 3′ direction, a U6 promoter, a guide RNA, an EFS promoter, a Cas effector protein, and a SV40 poly A tail. The Cas effector protein was CasM.19952 (SEQ ID NO: 23). The guide RNA had a nucleotide sequence of SEQ ID NO: 364. The scAAV vector was expressed with supporting plasmids to produce an adeno-associated virus (AAV). Activated primary T cells were transduced with the AAV at various concentrations (0, 5e+02, 5e+03, 5e+04, and 5e+05 GC/cell). About 96 hours post transduction, DNA or RNA was isolated from the infected cells. An indel caused by the guide nucleic acid was confirmed by sequencing and/or Q-PCR using amplicon SEQ ID NO: 472. Results of the dose response experiment are summarized in FIG. 24. An analysis of FIG. 24 indicates that AAV can be used to edit genes in primary T cells.

[0420] While various embodiments of the present invention have been shown and described herein, it will be apparent to those skilled in the art that such embodiments are provided by way of example only. Numerous variations, changes, and substitutions will now occur to those skilled in the art without departing from the invention. It should be understood that various alternatives to the embodiments of the invention described herein may be employed in practicing the invention. It is intended that the following claims define the scope of the invention and that methods and structures within the scope of these claims and their equivalents be covered thereby.

### Example 27. CasΦ.12 L26R mediated GFP integration in T cells

[0421] This example demonstrates the potential for generation of CAR T cells by integration of an exemplary GFP marker into the TRAC locus of T cells using RNP complexes of CasΦ.12 L26R having an amino acid sequence of SEQ ID NO: 2592, and a TRAC specific guide RNA having a sequence of mC*mU*mU*UCAAGACUAAUAGAUUGCUCCUUACGAGGAGACGAGUCUCUCAGCUG GmU* mA*mC (SEQ ID NO: 2593). Briefly, 2.5×10⁶ activated T cells were electroporated with a mixture of an mRNA encoding the CasΦ.12 L26R (10 μg) and an mRNA encoding the TRAC specific guide RNA (500 μmol). The transfected cells were divided into two portions. The first portion of the transfected cells were incubated at 37° C. and 5% CO₂ to allow for indel formation. The other portion was incubated at 37° C. and 5% CO₂ for 2 hours before AAV transduction. For the AAV transduction, AAV6 particles containing a donor nucleotide sequence encoding the GFP marker was added at 5×10⁵ MOI of the electroporated T cells for 24 hours. The transduced cells were washed of AAV6 particles and further incubated at 37° C. and 5% CO₂ to allow for knock in of the GFP marker. After 6 days post-transfection, the cells were processed by fluorescence-activated cell sorting (FACS) analysis and next generation sequencing (NGS) analysis. Indel percentage was calculated as the fraction of sequencing reads containing insertions or deletions relative to an unedited reference sequence. For negative control, AAV6 particles containing a donor nucleotide sequence encoding the GFP marker was used with activated naïve T cells.

[0422] Results of the TRAC gene knockout is shown in FIG. 25A, and results of GFP knock-in into the TRAC locus are shown in FIG. 25B. An analysis of FIGS. 25A-25B suggests that a donor nucleic acid can be integrated into the TRAC locus using the method described herein. The results were further confirmed by % indel analysis (FIG. 26).

### Example 28. CasΦ.12 L26R Mediated CD19-CAR Integration in T Cells

[0423] This example demonstrates the generation of CAR T cells by integration of a CD19-CAR encoding donor nucleic acid into the TRAC locus of T cells using RNP complexes of CasΦ.12 L26R having an amino acid sequence of SEQ ID NO: 2592, and a TRAC specific guide RNA having a sequence of mC*mU*mU*UCAAGACUAAUAGAUUGCUCCUUACGAGGAGACGAGUCUCUCAGCUG GmU* mA*mC (SEQ ID NO: 2593). Briefly, 2.5×10⁶ activated T cells were electroporated with a mixture of an mRNA encoding the CasΦ.12 L26R (10 μg) and an mRNA encoding the TRAC specific guide RNA (500 μmol). The transfected cells were divided into two portions. The first portion of the transfected cells were incubated at 37° C. and 5% CO₂ to allow for indel formation. The other portion was incubated at 37° C. and 5% CO₂ for 2 hours before AAV transduction. For the AAV transduction, AAV6 particles containing a donor nucleotide sequence encoding the CD19-CAR was added at 5×10⁵ MOI of the electroporated T cells for 24 hours. The transduced cells were washed of AAV6 particles and further incubated at 37° C. and 5% CO₂ to allow for knock-in of the CD19-CAR. After 6 days post-transfection, the cells were processed by fluorescence-activated cell sorting (FACS) analysis and next generation sequencing (NGS) analysis. Indel percentage was calculated as the fraction of sequencing reads containing insertions or deletions relative to an unedited reference sequence.

[0424] Results of the TRAC gene knockout is shown in FIG. 27A, and results of the CD19-CAR knock-in into the TRAC locus are shown in FIG. 27B. An analysis of FIGS. 27A-27B suggests that a donor nucleic acid can be integrated into the TRAC locus using the method described herein.

### Example 29. CasΦ.12 Mediated Single-Stranded Oligodeoxynucleotides (ssODNs) Integration in T Cells by HDR Pathway

[0425] This example demonstrates single-stranded oligodeoxynucleotides (ssODNs) integration in T cells by HDR pathway using an RNP complex of CasΦ.12 having an amino acid sequence of SEQ ID NO: 57, and a guide RNA targeting TRAC gene (AUUGCUCCUUACGAGGAGACGAGUCUCUCAGCUGGUA (SEQ ID NO: 1357)) or B2M gene (AUUGCUCCUUACGAGGAGACGGGCCGAGAUGUCUCGC (SEQ ID NO: 2639)), where the last 3 nucleotides of this gRNA were chemically modified with 2′ 0-Methyl. Briefly, 5×10⁵ activated T cells were electroporated with a mixture of an mRNA encoding the CasΦ.12 (250 μmol), an mRNA encoding the guide RNA (500 μmol), and a donor nucleic acid (150 μmol). 24 donor nucleic acids were designed for knock-in into the TRAC gene, wherein the donor nucleic acids were chemically modified for enhancing HDR. In contrast, 12 donor nucleic acids were designed for knock-in into the B32M gene. TABLE 36 lists sequences of the donor nucleic acids that are tested for this experiment.

TABLE 37
Donor Nucleic Acid Sequences

| Target | SEQ ID | |
|---|---|---|
| Gene | NO: | Sequence |
| TRAC | 2603 | AAAATCGGTGAATAGGCAGACAGACTTGTCACTGGATTTAGCGG |
| | | CCGCGAGTCTCTCAGCTGGTACACGGCAGGGTCAGGGTTCTGG |
| TRAC | 2604 | CAGACAGACTTGTCACTGGATTTAGAGTCTCTCAGCTGGTGCGG |
| | | CCGCACACGGCAGGGTCAGGGTTCTGGATATCTGTGGGACAAGA |
| TRAC | 2605 | CACAGATATCCAGAACCCTGACCCTGCCGTGTACCAGCTGGCGG |
| | | CCGCAGAGACTCTAAATCCAGTGACAAGTCTGTCTGCCTATTCA |
| TRAC | 2606 | AATCGGTGAATAGGCAGACAGACTTGTCACTGGATTTAGAGCGG |
| | | CCGCGTCTCTCAGCTGGTACACGGCAGGGTCAGGGTTCTGGATA |
| TRAC | 2607 | GACAGACTTGTCACTGGATTTAGAGTCTCTCAGCTGGTACGCGG |
| | | CCGCACGGCAGGGTCAGGGTTCTGGATATCTGTGGGACAAGAGG |
| TRAC | 2608 | CCCACAGATATCCAGAACCCTGACCCTGCCGTGTACCAGCGCGG |
| | | CCGCTGAGAGACTCTAAATCCAGTGACAAGTCTGTCTGCCTATT |
| TRAC | 2609 | TCGGTGAATAGGCAGACAGACTTGTCACTGGATTTAGAGTGCGG |
| | | CCGCCTCTCAGCTGGTACACGGCAGGGTCAGGGTTCTGGATATC |
| TRAC | 2610 | CAGACTTGTCACTGGATTTAGAGTCTCTCAGCTGGTACACGCGG |
| | | CCGCGGCAGGGTCAGGGTTCTGGATATCTGTGGGACAAGAGGAT |
| TRAC | 2611 | GTCCCACAGATATCCAGAACCCTGACCCTGCCGTGTACCAGCGG |
| | | CCGCGCTGAGAGACTCTAAATCCAGTGACAAGTCTGTCTGCCTA |
| TRAC | 2612 | GGTGAATAGGCAGACAGACTTGTCACTGGATTTAGAGTCTGCGG |
| | | CCGCCTCAGCTGGTACACGGCAGGGTCAGGGTTCTGGATATCTG |
| TRAC | 2613 | TGTCACTGGATTTAGAGTCTCTCAGCTGGTACACGGCAGGGGGG |
| | | CCGCGTCAGGGTTCTGGATATCTGTGGGACAAGAGGATCAGGGT |
| TRAC | 2614 | TTGTCCCACAGATATCCAGAACCCTGACCCTGCCGTGTACGCGG |
| | | CCGCCAGCTGAGAGACTCTAAATCCAGTGACAAGTCTGTCTGCC |
| TRAC | 2615 | TGAATAGGCAGACAGACTTGTCACTGGATTTAGAGTCTCTGCGG |
| | | CCGCCAGCTGGTACACGGCAGGGTCAGGGTTCTGGATATCTGTG |
| TRAC | 2616 | TCCAGAACCCTGACCCTGCCGTGTACCAGCTGAGAGACTCGCGG |
| | | CCGCTAAATCCAGTGACAAGTCTGTCTGCCTATTCACCGATTTT |
| TRAC | 2617 | TCTTGTCCCACAGATATCCAGAACCCTGACCCTGCCGTGTGCGG |
| | | CCGCACCAGCTGAGAGACTCTAAATCCAGTGACAAGTCTGTCTG |
| TRAC | 2618 | AATAGGCAGACAGACTTGTCACTGGATTTAGAGTCTCTCAGCGG |
| | | CCGCGCTGGTACACGGCAGGGTCAGGGTTCTGGATATCTGTGGG |
| TRAC | 2619 | TATCCAGAACCCTGACCCTGCCGTGTACCAGCTGAGAGACGCGG |
| | | CCGCTCTAAATCCAGTGACAAGTCTGTCTGCCTATTCACCGATT |
| TRAC | 2620 | CCTCTTGTCCCACAGATATCCAGAACCCTGACCCTGCCGTGCGG |
| | | CCGCGTACCAGCTGAGAGACTCTAAATCCAGTGACAAGTCTGTC |
| TRAC | 2621 | TAGGCAGACAGACTTGTCACTGGATTTAGAGTCTCTCAGCGCGG |
| | | CCGCTGGTACACGGCAGGGTCAGGGTTCTGGATATCTGTGGGAC |
| TRAC | 2622 | GATATCCAGAACCCTGACCCTGCCGTGTACCAGCTGAGAGGCGG |
| | | CCGCACTCTAAATCCAGTGACAAGTCTGTCTGCCTATTCACCGA |
| TRAC | 2623 | ATCCTCTTGTCCCACAGATATCCAGAACCCTGACCCTGCCGCGG |
| | | CCGCGTGTACCAGCTGAGAGACTCTAAATCCAGTGACAAGTCTG |
| TRAC | 2624 | GGCAGACAGACTTGTCACTGGATTTAGAGTCTCTCAGCTGGCGG |
| | | CCGCGTACACGGCAGGGTCAGGGTTCTGGATATCTGTGGGACAA |
| TRAC | 2625 | CAGATATCCAGAACCCTGACCCTGCCGTGTACCAGCTGAGGCGG |
| | | CCGCAGACTCTAAATCCAGTGACAAGTCTGTCTGCCTATTCACC |
| TRAC | 2626 | ACCCTGATCCTCTTGTCCCACAGATATCCAGAACCCTGACGCGG |
| | | CCGCCCTGCCGTGTACCAGCTGAGAGACTCTAAATCCAGTGACA |
| B2M | 2627 | GGCGTCGCGCTGGCGGGCATTCCTGAAGCTGACAGCATTCgcgg |
| | | ccgcGGGCCGAGATGTCTCGCTCCGTGGCCTTAGCTGTGCTCGC |
| B2M | 2628 | CGTCGCGCTGGCGGGCATTCCTGAAGCTGACAGCATTCGGgcgg |
| | | ccgcGCCGAGATGTCTCGCTCCGTGGCCTTAGCTGTGCTCGCGC |
| B2M | 2629 | TCGCGCTGGCGGGCATTCCTGAAGCTGACAGCATTCGGGCgcgg |
| | | ccgcCGAGATGTCTCGCTCCGTGGCCTTAGCTGTGCTCGCGCTA |
| B2M | 2630 | GCGCTGGCGGGCATTCCTGAAGCTGACAGCATTCGGGCCGgcgg |
| | | ccgcAGATGTCTCGCTCCGTGGCCTTAGCTGTGCTCGCGCTACT |
| B2M | 2631 | GCTGGCGGGCATTCCTGAAGCTGACAGCATTCGGGCCGAGgcgg |
| | | ccgcATGTCTCGCTCCGTGGCCTTAGCTGTGCTCGCGCTACTCT |
| B2M | 2632 | TGGGGGCATTCCTGAAGCTGACAGCATTCGGGCCGAGATgcggc |
| | | cgcGTCTCGCTCCGTGGCCTTAGCTGTGCTCGCGCTACTCTCT |
| B2M | 2633 | GCGGGCATTCCTGAAGCTGACAGCATTCGGGCCGAGATGTgcgg |
| | | ccgcCTCGCTCCGTGGCCTTAGCTGTGCTCGCGCTACTCTCTCT |
| B2M | 2634 | GGGCATTCCTGAAGCTGACAGCATTCGGGCCGAGATGTCTgcgg |
| | | ccgcCGCTCCGTGGCCTTAGCTGTGCTCGCGCTACTCTCTCTTT |
| B2M | 2635 | GCATTCCTGAAGCTGACAGCATTCGGGCCGAGATGTCTCGgcgg |
| | | ccgcCTCCGTGGCCTTAGCTGTGCTCGCGCTACTCTCTCTTTCT |
| B2M | 2636 | ATTCCTGAAGCTGACAGCATTCGGGCCGAGATGTCTCGCTgcgg |
| | | ccgcCCGTGGCCTTAGCTGTGCTCGCGCTACTCTCTCTTTCTGG |
| B2M | 2637 | TCCTGAAGCTGACAGCATTCGGGCCGAGATGTCTCGCTCCgcgg |
| | | ccgcGTGGCCTTAGCTGTGCTCGCGCTACTCTCTCTTTCTGGCC |
| B2M | 2638 | CTGAAGCTGACAGCATTCGGGCCGAGATGTCTCGCTCCGTgcgg |
| | | ccgcGGCCTTAGCTGTGCTCGCGCTACTCTCTCTTTCTGGCCTG |

[0426] The electroporated cells were incubated at 37° C. and 500 CO₂ for ˜48 hours to allow for indel formation and knock-in of the donor nucleic acid. DNA was extracted from the electroporated cells 48 hours post-transfection and analyzed by next generation sequencing (NGS). Fluorescence-activated cell sorting (FACS) analysis is performed 5 days post-transfection.

[0427] FIG. 28 shows representative data for CasΦ.12 mediated ssODN integration of the donor nucleic acid into the TRAC locus and B32M locus. For negative control, cells were electroporated only with ssODN.

### Example 30. CasΦ.12 L26R Mediated GFP Integration by HDR Pathway in T Cells

[0428] The example compares EGFP-CAR integration levels after TRAC knockout with an effector protein by HDR pathway, where the effector protein was delivered by electroporation to T cells either as an RNP complex and an mRNA encoding the effector protein. The effector protein comprised CasΦ.12 L26R having an amino acid sequence of SEQ ID NO: 2592. The guide RNA that was used for the experiment comprised a nucleotide sequence of mC*mU*mU*UCAAGACUAAUAGAUUGCUCCUUACGAGGAGACGAGUCUCUCAGCUG G mU*mA*mC (SEQ ID NO: 2593). FIG. 29 shows schematics of the study design. Briefly, 5×10⁵ activated T cells were electroporated with the guide RNA (500 μmol) and a donor nucleic acid (150 μmol) in combination with either 10 μg of an mRNA encoding the CasΦ.12 L26R (For mRNA transfection) or 250 pmol of CasΦ.12 L26R protein (For RNP complex transfection).

[0429] The transfected cells were divided into two portions. The first portion of the transfected cells was incubated at 37° C. and 5% CO₂ to allow for indel formation. The other portion was incubated at 37° C. and 5% CO₂ for 1 hours before AAV transduction. For the AAV transduction, AAV6 particles comprising a donor nucleotide sequence encoding the EGFP-CAR was added at 5×10⁵ MOI of the electroporated T cells for 24 hours. For negative control, untransfected T cells were transduced by the AAV6 particles. The transduced cells were washed of AAV6 particles and further incubated at 37° C. and 5% CO₂ to allow for knock-in of the CD19-CAR. After 6 days post-transfection, the cells were processed by fluorescence-activated cell sorting (FACS) analysis. The results were further confirmed by the next generation sequencing (NGS) analysis.

[0430] FIGS. 30A and 30D shows that comparable portions of both, the RNP comprising the effector protein and the mRNA encoding the effector protein, treated T cells were not expressing CD3 protein. FIGS. 30B and 30E show that comparable portions of both, the RNP comprising the effector protein and the mRNA encoding the effector protein, treated T cells showed GFP expressing. However, low EGFP-CAR integration was observed on both occasions. Negative controls are shown in FIGS. 30C and 30F, wherein naïve T cells were treated only the AAV6 particles. FIGS. 31A-31B shows alternate representation of the data showed in FIGS. 30A-30F. An analysis of FIG. 31A indicates that both, the RNP transfection and the mRNA transfection, are effective for knocking out TRAC gene in T cells. An analysis of FIG. 31B indicates that both, the RNP transfection and the mRNA transfection, are effective for knocking out TRAC gene, knocking-in EGFP-CAR gene and expressing GFP in T cells. However, it was observed that although GFP integration levels were comparable, the RNP transfection method showed lower editing ability relative to the mRNA transfection method.

### Example 31. Targeted CasΦ.12 L26R Effector Protein Mediated Integration of Promoter-Less CD19-CAR into TRAC Locus

[0431] The example demonstrates the generation of T cells with a CD19-specific chimeric antigen receptor (CAR) integrated into the TRAC locus of T cells using an RNP complex and HDR-based insertion method. The T cells that were generated were further tested for their cytotoxic activity on CD19-expressing NALM-6 cells using an LDH release assay.

[0432] The RNP complex was prepared by incubating 250 pmol of CasΦ.12 L26R effector protein (SEQ ID NO: 2592) and 500 pmol of a guide RNA (mC*mU*mU*UCAAGACUAAUAGAUUGCUCCUUACGAGGAGACGAGUCUCUCAGCUG G mU* mA*mC (SEQ ID NO: 2593)) at room temperature for 30 minutes. FIG. 32 shows schematics of the study design. Briefly, 5×10⁵ activated T cells were electroporated with the RNP complex. The cells were then allowed to recover at 37° C. and 5% CO₂ for 2 hours before AAV transduction. For the AAV transduction, AAV6 particles containing a donor nucleotide sequence encoding the CD19-CAR or a donor nucleotide sequence encoding GFP was added at 1×10⁵ MOI of the transfected T cells. The transduced cells were allowed to recover at 37° C. and 5% CO₂ for 5 days. The transduced cells were then processed for fluorescence-activated cell sorting (FACS) analysis to determine knock-in of the donor nucleotide sequence. The cells transduced with the donor nucleotide encoding CD19-CAR, no signal was observed for the CD19-CAR construct on the cell surface. Similarly, as shown in FIG. 33, the cells transduced with the donor nucleotide encoding GFP, about 49% of TRAC knock out cells were observed to have GFP integration. The results were further confirmed by the next generation sequencing (NGS) analysis.

[0433] For the NALM6 cell killing assay, the transduced cells were further processed through magnetic bead separation method for enriching CD3⁻ cells from about 87.7% CD3⁻ cells before sorting to 97.2% CD3⁻ cells after sorting. The CD3⁻ cells were then incubated with NALM6 cells in a supporting media at a ratio of 50000:10000 and 10000:10000 for 24 hours at 37° C. After 24 hours, specific cytotoxicity of the NALM6 cells by CD19-CAR knock-in cells, GFP knock-in cells and control untreated T cells was quantified by a colorimetric assay by determining an amount of lactate dehydrogenase (LDH) released from the cells. % cytotoxicity was calculated using formula 1.

$$\% Cytotoxicity = [ \frac{\begin{matrix}( Experimental - T cell Spont . Release - \\ NLM 6 Spont . Release )\end{matrix}}{( NALM 6 Max . Release - T cell Spont . Release )} ] \times 100 \qquad Formula 1$$

[0434] Specific cytotoxicity of the NALM6 cells by CD19-CAR knock-in cells, GFP knock-in cells and control untreated T cells is shown in FIG. 34. An analysis of FIG. 34 indicates that CD19-CAR knock-in cells showed significantly higher cell killing than GFP knock-in cells.

### Example 32. Evaluation of T Cell Fitness Post Gene Editing by CasΦ.12 L26R

[0435] The example demonstrates B2M knock out ability of CasΦ.12 L26R effector proteins in T cells and T cell memory profiles that had B2M gene knocked out.

[0436] The RNP complex was prepared by incubating 250 pmol of CasΦ.12 L26R effector protein (SEQ ID NO: 2592) and 500 pmol of a guide RNA (mC*mU*mU*UCAAGACUAAUAGAUUGCUCCUUACGAGGAGACAGCAAGGACUGGUC mU*mU*mU (SEQ ID NO: 2640)) at room temperature for 30 minutes. Briefly, 5×10⁵ activated T cells were electroporated with the RNP complex. The cells were then allowed to recover at 37° C. and 5% CO₂ for 72 hours. The transduced cells were then processed for fluorescence-activated cell sorting (FACS) analysis to determine knock out in B2M locus as well as T cell memory profile. Cas9 system was used as a positive control. As shown in FIG. 35, CasΦ.12 L26R effector protein showed high level of editing. Two experiments were conducted for determining T cell memory profiles: (1) CD4+ T cell panel (FIG. 36A); and (2) CD8+ T cell panel (FIG. 36B).

[0437] An analysis of FIGS. 36A-36B indicates that T cells were able to maintain fitness after CasΦ.12 L26R effector protein mediated gene editing treatment.

### Example 33. Evaluation of T Cell Fitness Post Gene Editing by CasΦ.12 and Variants Thereof at Low Dose

[0438] The example demonstrates T cell memory profiles that had B2M gene knocked out by CasΦ.12 effector protein (SEQ ID NO: 57), CasΦ.12 L26R effector protein (SEQ ID NO: 2592), or CasM.265466 effector protein (SEQ ID NO: 2435). Cas9 effector protein was used as a positive control.

[0439] Briefly, 3×10⁵ activated T cells were electroporated with 500 μM of a guide RNA and an mRNA encoding the effector protein at 1 μg, 2 μg, 5 μg or 10 μg concentration. With CasΦ.12 and CasΦ.12 L26R, the guide RNA of SEQ ID NO: 2640 was used. With CasM.265466, the guide RNA of SEQ ID NO: 2448 was used. The cells were then allowed to recover at 37° C. and 5% CO₂. The transduced cells were then processed for fluorescence-activated cell sorting (FACS) analysis to determine knock out in B2M locus (FIG. 37). The knock-out results of FACS were further confirmed by NGS analysis (FIG. 38). Additionally, two experiments were conducted for determining T cell memory profiles: (1) CD4+ T cell panel (FIGS. 39A-39D); and (2) CD8+ T cell panel (FIGS. 40A-40D).

[0440] An analysis of FIGS. 39A-39D and 40A-40D indicates that T cell maintained fitness after CasΦ.12 effector protein, CasΦ.12 L26R effector protein or CasM.265466 effector protein mediated gene editing treatment.

### Example 34. Off-Target Sites in Primary T Cells for Guide RNA Targeting B2M Gene and CasΦ.12

[0441] The example demonstrates a guide RNA that was targeting the B2M gene were found to have high specificity in primary T cells. CasΦ.12 effector protein comprising an amino acid sequence of SEQ ID NO: 57 was used. The guide RNA comprises a nucleotide sequence of SEQ ID NO: 1381. T cells were electroporated with 500 pmol of guide RNA and 20 μg of CasΦ.12 effector mRNA. 29 off-target sites in primary T cells were tested for the guide RNA.

[0442] Only three off-target sites with detectable indels (>0.1% indel) were observed. Extrapolating the results, % of reads modified at off-target sites were calculated to be 1.92%, 1.27% and 0.42%, respectively.

### Example 35. Off-Target Sites in Primary T Cells for Guide RNA Targeting TRAC Gene and CasΦ.12

[0443] The example demonstrates a guide RNA that was targeting the TRAC gene was found to have high specificity in primary T cells. CasΦ.12 effector protein comprising an amino acid sequence of SEQ ID NO: 57 was used. The guide RNA comprises a nucleotide sequence of SEQ ID NO: 1382. T cells were electroporated with 500 pmol of guide RNA and 20 μg of CasΦ.12 effector mRNA. 25 off-target sites in primary T cells were tested for the guide RNA.

[0444] Only two off-target sites with detectable indels (>0.1% indel) were observed. Extrapolating the results, % of reads modified at off-target sites were calculated to be 0.26% and 0.25%, respectively.

### Example 36: PAM Screening for CasM.265466 Effector Protein

[0445] CasM.265466 effector protein and guide RNA combinations represented in TABLE 38 were screened by in vitro enrichment (IVE) for PAM recognition. The CasM.265466 comprises amino acid sequence of SEQ ID NO: 2435. The nucleotide sequences of the guide components are shown in TABLE 38. For example, as shown in TABLE 38, the effector protein complexed with a guide comprising a crRNA of SEQ ID NO: 2594 and a tracrRNA of SEQ ID NO: 2597 was screened for PAM recognition.

TABLE 38
Compositions for PAM Sequence Recognition

| | Effector | | |
|---|---|---|---|
| | protein | | |
| Composition | (SEQ ID | guide RNA | tracrRNA |
| No. | NO:) | (SEQ ID NO:) | (SEQ ID NO:) |
| 1 | 2435 | GUUUGAGAACCUUAUGAA | ACAGCUUAUUUGGAAGCU |
| | | AUUACAAGGAUGCCAAAC | GAAAUGUGAGGUUUAUAA |
| | | UAUUAAAUACUCGUAUUG | CACUCACAAGAAUCCU |
| | | CU (SEQ ID NO: | (SEQ ID NO: 2597) |
| | | 2594) | |
| 2 | 2435 | GUUUGAGAACCUUAUGAA | UAUAUUUGAUAAAAAUAU |
| | | AUUACAAGGAUGCCAAAC | ACAGCUUAUUUGGAAGCU |
| | | UAUUAAAUACUCGUAUUG | GAAAUGUGAGGUUUAUAA |
| | | CU (SEQ ID NO: | CACUCACAAGAAUCC |
| | | 2595) | (SEQ ID NO: 2598) |
| 3 | 2435 | ACAGCUUAUUUGGAAGCU | |
| | | GAAAUGUGAGGUUUAUAA | |
| | | CACUCACAAGAAUCCUGA | |
| | | AAAAGGAUGCCAAACUAU | |
| | | UAAAUACUCGUAUUGCU | |
| | | (SEQ ID NO: 2596) | |

[0446] Briefly, effector proteins were complexed with corresponding guide RNAs for 15 minutes at 37° C. The complexes were added to an IVE reaction mix. PAM screening reactions used 10 μl of RNP in 100 μl reactions with 1,000 ng of a 5′ PAM library in 1× Cutsmart buffer and were carried out for 15 minutes at 25° C., 45 minutes at 37° C. and 15 minutes at 45° C. Reactions were terminated with 1 μl of proteinase K and 5 μl of 500 mM EDTA for 30 minutes at 37° C. Next generation sequencing was performed on cut sequences to identify enriched PAM sequence for CasM.265466 as shown in TABLE 39. Cis cleavage by each complex was confirmed by gel electrophoresis.

[0447] The most enriched PAM was represented by the sequence 5′-TNTR-3′, wherein N is any nucleotide and R is adenine or guanine.

[0448] The assay conducted in this example can also be repeated using CasM.292007 (SEQ ID NO: 2599). Based on significant homology between SEQ ID NO: 2435 and SEQ ID NO: 2599, and based on the results described above, the PAM for CasM.292007 is predicted to be 5′-TNTR-

TABLE 39
Exemplary PAM Sequences
PAM Sequence

NNTNTR
TNTR

wherein each N is independently any one of A, G, C, or T.
wherein each R is independently any one of A, or G.

### Example 37: Additional PAM Screening for CasM.265466

[0449] Prior in vitro screening as described in Example 38 for CasM.265466 effector protein (SEQ ID NO: 2435) PAM recognition demonstrated that the most enriched PAM sequence for CasM.265466 was a TNTR PAM sequence, but also indicated that the effector protein may tolerate a more flexible PAM sequences beyond TNTR without significantly compromising nuclease activity. Effector protein and flexible PAM group combinations as set forth in TABLE 40 were screened to confirm that chromosomal DNA may be efficiently targeted in mammalian cells (HEK293T) using a more flexible PAM sequence.

[0450] Single and double point mutations were made along TNTR.

TABLE 40
PAM SEQUENCES
PAM Group*

NNTN
ANTR
CNTR
GNTR
TNAR
TNCR
TNGR
TNTC
TNTT
VNTY
TNVY

*wherein each N is any nucleotide, each R is A or G, and each V is A, C or G.

[0451] At least six spacers that previously showed >3% indel rate were selected for each PAM group identified in TABLE 40.

[0452] Single guide nucleic acids (sgRNA) comprising the handle sequence of SEQ ID NO: 2522 linked to a 20 nt spacer sequence.

[0453] Plasmids encoding CasM.265466 effector protein and plasmids encoding the sgRNAs were delivered by lipofection to HEK293T cells and permitted to grow to allow for indel formation. Cells were lysed and indels were detected by next generation sequencing. Indel percentage was calculated and plotted as shown in FIG. 41.

[0454] While the top performing complexes were found to produce up to or greater than 30% indel, the data also demonstrates that single and double point mutations at ˜4 and −1 were the most permissive for allowing nuclease activity. Furthermore, the CasM.265466 effector protein complexed with two different sgRNAs having different spacer sequences generated 20% indel at targeted sequences adjacent to an NNTN PAM. Therefore, these results further confirm the results of Example 36 and demonstrate that the CasM.265466 effector protein recognizes a flexible NNTN PAM sequence.

### Example 38. CasM.265466 Mediated GFP Integration in T Cells

[0455] This example demonstrates the generation of T cells having a GFP marker integrated into the TRAC locus of T cells using RNP complexes of CasM.265466 having an amino acid sequence of SEQ ID NO: 2435, and a TRAC specific guide RNA having a sequence of SEQ ID NO: 2488, 2489 or 2490. Briefly, 2.5×10⁶ activated T cells were electroporated with a mixture of an mRNA encoding the CasM.265466 (10 μg) and an mRNA encoding the TRAC specific guide RNA (500 μmol). The transfected cells were divided into two portions. The first portion of the transfected cells were incubated at 37° C. and 5% CO₂ for ˜72 hours to allow for indel formation. The other portion was incubated at 37° C. and 5% CO₂ for 2 hours before AAV transduction. For the AAV transduction, AAV6 particles containing a donor nucleotide sequence encoding the GFP marker was added at 5×10⁵ MOI of the electroporated T cells for 24 hours. The transduced cells were washed of AAV6 particles and further incubated at 37° C. and 5% CO₂ for 48 hours to allow for knock in of the GFP marker. After 6 days post AAV addition, the cells were processed by fluorescence-activated cell sorting (FACS) analysis and next generation sequencing (NGS) analysis. Indel percentage was calculated as the fraction of sequencing reads containing insertions or deletions relative to an unedited reference sequence. For negative control, AAV6 particles containing a donor nucleotide sequence encoding the GFP marker was used with activated naïve T cells.

[0456] An analysis of FIGS. 42A-42C and 43A indicates that all three guide RNAs were able to successfully knock out TRAC gene. An analysis of FIGS. 42D-42F and 43C indicates that GFP was successfully integrated into TRAC locus after treatment with the RNP complex. FIGS. 42G-42I show results of the negative control that did not show GFP expression. The results were further confirmed by NGS analysis (FIG. 43B). In conclusion, the study shows that a donor nucleic acid can be integrated into the TRAC locus using the method described herein.

### Example 39. Targeted CasM.265466 Effector Protein Mediated Integration of Promoter-Less CD19-CAR into TRAC Locus

[0457] The example demonstrates the generation of T cells with a CD19-specific chimeric antigen receptor (CAR) integrated into the TRAC locus of T cells using an RNP complex and HDR-based insertion method. The T cells that are generated are further tested for their cytotoxic activity on CD19-expressing NALM-6 cells using an LDH release assay.

[0458] The RNP complex is prepared by incubating 250 pmol of CasM.265466 effector protein (SEQ ID NO: 2435) and 500 pmol of a guide RNA (SEQ ID NO: 2490) at room temperature for 30 minutes. FIG. 32 shows schematics of the study design. Briefly, 5×10⁵ activated T cells are electroporated with the RNP complex. The cells are then allowed to recover at 37° C. and 5% CO₂ for 2 hours before AAV transduction. For the AAV transduction, AAV6 particles containing a donor nucleotide sequence encoding the CD19-CAR or a donor nucleotide sequence encoding GFP are added at 1×10⁵ MOI of the transfected T cells. The transduced cells are allowed to recover at 37° C. and 5% CO₂ for 5 days. The transduced cells are then processed for fluorescence-activated cell sorting (FACS) analysis to determine knock-in of the donor nucleotide sequence. The results are further confirmed by the next generation sequencing (NGS) analysis.

[0459] For the NALM6 cell killing assay, the transduced cells are further processed through magnetic bead separation method for enriching CD3⁻ cells. The CD3⁻ cells are then incubated with NALM6 cells in a supporting media at a ratio of 50000:10000 and 10000:10000 for 24 hours at 37° C. After 24 hours, specific cytotoxicity of the NALM6 cells by CD19-CAR knock-in cells, GFP knock-in cells and control untreated T cells is quantified by a colorimetric assay by determining an amount of lactate dehydrogenase (LDH) released from the cells. % cytotoxicity was calculated using formula 1.

### Example 40. Off-Target Sites in Primary T Cells for CasM.265466 Effector Protein and Guide RNA Targeting B2M Gene

[0460] The example demonstrates three guide RNAs that were targeting the B2M gene were found to have high specificity in primary T cells. CasM.265466 effector protein comprising an amino acid sequence of SEQ ID NO: 2435 was used. Three guide RNAs, each having a handle sequence of SEQ ID NO: 2523 and a spacer sequence of SEQ ID NO: 2439, 2448, or 2450, were tested. T cells were electroporated with guide RNA and Cas 265466 effector mRNA at the following concentration ratios: 1) 5 μg Cas 265466 mRNA and 500 pmol guide RNA; 2) 10 μg Cas 265466 mRNA and 500 pmol guide RNA; 3) 10 μg Cas 265466 mRNA and 1000 pmol guide RNA; 4) 20 μg Cas 265466 mRNA and 500 pmol guide RNA; and 5) 20 μg Cas 265466 mRNA and 1000 pmol guide RNA. 18, 17 and 11 off-target sites in primary T cells were tested for the guides having spacer sequences of SEQ ID NO: 2439, 2448, and 2450, respectively.

[0461] Only one off-target site with detectable indels (>0.1% indel) was observed for the guides having spacer sequences of SEQ ID NO: 2439 and 2450, respectively. Extrapolating the results, % of reads modified at off-target sites were calculated to be 0.47% and 0.56%, respectively.

### Example 41. Off-Target Sites in Primary T Cells for CasM.265466 Effector Protein and Guide RNA Targeting TRAC Gene

[0462] The example demonstrates three guide RNAs that were targeting the TRAC gene were found to have high specificity in primary T cells. CasM.265466 effector protein comprising an amino acid sequence of SEQ ID NO: 2435 was used. Three guide RNAs, each having a handle sequence of SEQ ID NO: 2523 and a spacer sequence of SEQ ID NO: 2452, 2462 or 2476, were tested. T cells were electroporated with guide RNA and Cas 265466 effector mRNA at the following concentration ratios: 1) 5 μg Cas 265466 mRNA and 500 pmol guide RNA; 2) 5 μg Cas 265466 mRNA and 1000 pmol guide RNA; 3) 10 μg Cas 265466 mRNA and 500 pmol guide RNA; 4) 10 μg Cas 265466 mRNA and 500 pmol guide RNA; and 5) 10 μg Cas 265466 mRNA and 1000 pmol guide RNA. 9, 7 and 5 off-target sites in primary T cells were tested for the guides having spacer sequences of SEQ ID NO: 2452, 2462 and 2476, respectively.

[0463] No off-target sites with detectable indels (>0.1% indel) was observed for any of the three guide RNAs tested.

### Example 42. Off-Target Sites in Primary T Cells for CasM.265466 Effector Protein and Guide RNA Targeting CIITA Gene

[0464] The example demonstrates three guide RNAs that were targeting the CIITA gene were found to have high specificity in primary T cells. CasM.265466 effector protein comprising an amino acid sequence of SEQ ID NO: 2435 was used. Three guide RNAs, each having a handle sequence of SEQ ID NO: 2523 and a spacer sequence of SEQ ID NO: 2488, 2489 or 2490, were tested. T cells were electroporated with guide RNA and Cas 265466 effector mRNA at the following concentration ratios: 1) 5 μg Cas 265466 mRNA and 500 pmol guide RNA; 2) 5 μg Cas 265466 mRNA and 1000 pmol guide RNA; 3) 10 μg Cas 265466 mRNA and 500 pmol guide RNA; and 4) 10 μg Cas 265466 mRNA and 1000 pmol guide RNA. 30, 15 and 8 off-target sites in primary T cells were tested for the guides having spacer sequences of SEQ ID NO: 2488, 2489 and 2490, respectively.

[0465] Only two off-target sites with detectable indels (>0.1% indel) were observed for the guide having a spacer sequence of SEQ ID NO: 2490. Extrapolating the results, % of reads modified at off-target sites were calculated to be 0.8% and 1.8%, respectively.

### Example 43. Arginine Mutation Scanning of CasM.265466 to Identify Charge Substitution Rules of Effector Protein Activity

[0466] CasM.265466 arginine mutants were tested for their ability to produce indels in HEK293T cells. A total of 368 arginine mutants were tested. Briefly, a first plasmid encoding a CasM.265466 arginine mutant and a second plasmid encoding a single guide RNA were delivered by lipofection to HEK293T cells. The sgRNA comprised a nucleotide sequence of ACAGCUUAUUUGGAAGCUGAAAUGUGAGGUUUAUAACACUCACAAGAAUCCUGAAAAA GGAUGCCAAACUCUUCGCCCAGAGCAUCCCA (SEQ ID NO: 2600). The sgRNA comprised a spacer sequence that was designed to hybridize to a target sequence adjacent to a PAM of TNTR (e.g., TTTG). For lipofections, 15 ng of the nuclease mutant and 150 ng of the guide RNA encoding plasmid were delivered to ˜30,000 HEK293T cells in 200 μl using TransIT-293 lipofection reagent. Lipofected cells were grown for ˜72 hrs at 37° C. to allow for indel formation. Indels were detected by next generation sequencing of PCR amplicons at the targeted loci and indel percentage was calculated as the fraction of sequencing reads containing insertions or deletions relative to an unedited reference sequence. Sequencing libraries with less than 20% of reads aligning to the reference sequence were excluded from the analysis for quality control purposes. Wildtype CasM.265466 was included as positive control and reference for the mutants.

[0467] The mean indel percentage for each of the arginine mutant is shown in FIG. 44. An analysis of FIG. 44 indicates that positive charge of arginine may strengthen the interaction between the effector protein and the negatively charged DNA backbone. Top 10 arginine mutants that showed increase in indel potency includes I80R, T84R, K105R, G210R, C202R, A218R, D220R, E225R, C246R, and Q360R.

### Example 44. CasM.265466 Arginine Mutants and their Potency for Indel Generation

[0468] The top ten nuclease mutants, each comprising different CasM.265466 arginine mutant, as identified in Example 43 were tested for their ability to produce indels in HEK293T cells over a variety of doses. Briefly, a first plasmid encoding a CasM.265466 mutant and a second plasmid encoding a single guide RNA (sgRNA) were delivered by lipofection to HEK293T cells. The sequence of the sgRNAs included a nucleotide sequence of

(SEQ ID NO: 2600)
ACAGCUUAUUUGGAAGCUGAAAUGUGAGGUUUAUAACACUCACAAGAAUC
CUGAAAAAGGAUGCCAAACUCUUCGCCCAGAGCAUCCCA.

The sgRNA spacer was designed to hybridize to a target sequence adjacent to a PAM of TNTR (e.g., TTTG). For lipofections, the CasM.265466 mutant and sgRNA were delivered to ˜30,000 HEK293T cells in 200 μl using TransIT-293 lipofection reagent. Each of the ten nuclease mutants were tested at a dose ranging from 1.17 ng to 150 ng. The sgRNA encoding plasmid was used at a concentration of 150 ng. Lipofected cells were grown for ˜72 hrs at 37° C. to allow for indel formation. Indels were detected by next generation sequencing of PCR amplicons at the targeted loci and indel percentage was calculated as the fraction of sequencing reads containing insertions or deletions relative to an unedited reference sequence. Sequencing libraries with less than 20% of reads aligning to the reference sequence were excluded from the analysis for quality control purposes. Wildtype CasM.265466 was included as positive control and reference for the mutants.

[0469] The mean indel percentage and standard deviation based on three replicates is reported in FIG. 45. An analysis of FIG. 45 indicates that arginine substitution can increase potency of the effector protein in the generation of indels.

### Example 45. CasM.265466 and D220R Variant Thereof for MLH1 Gene Editing in HEK293T Cells

[0470] The purpose of this study was to test guide nucleic acids for MLH1 gene knockout with CasM.265466 effector protein and D220R variant thereof by electroporation in HEK293T cells. The CasM.265466 effector protein comprised an amino acid sequence of SEQ ID NO: 2435. The D220R variant comprised an amino acid sequence of SEQ ID NO: 2601. The guide RNA comprised a handle sequence of SEQ ID NO: 2522 linked to a spacer sequence of AGUCUCCAGGAAGAAAUUAA (SEQ ID NO: 2602). Briefly, 2.3×10⁵ HEK293T cells were electroporated with 0.75 μg of the effector protein mRNA, 1.25 μg of guide RNA, and 100 pmol of a donor nucleic acid. The cells were then allowed to recover at 37° C. and 5% CO₂. DNA was extracted 72 hours post-transfection and % indel generation and donor nucleic acid insertion was measured by NGS analysis (FIGS. 46A-46B).

[0471] As shown in FIG. 46A, the D220R variant showed % indel twice relative to the corresponding wildtype CasM.265466 effector protein. However, in contrast, the D220R variant did not improve insertion of the donor nucleic acid relative to the corresponding wildtype CasM.265466 effector protein (FIG. 46B).

### Example 46. CasM.265466 D220R Variant B2M Gene Editing Studies in T Cells

[0472] The purpose of this study was to test CasM.265466 D220R variant effector protein (SEQ ID NO: 2601) for B2M knockout relative to corresponding wildtype CasM.265466 effector protein (SEQ ID NO: 2435) in T cells. The guide RNA comprises a handle sequence of SEQ ID NO: 2522 linked to a spacer sequence of SEQ ID NO: 1637. Briefly, 3×10⁵ activated T cells were electroporated with the guide RNA at a concentration of 500 pmol and the effector protein mRNA at a concentration of 0.5 μg, 1 μg, 2 μg, 5 μg, or 10 μg. After 72 hours post-transfection, the cells were processed by fluorescence-activated cell sorting (FACS) analysis and next generation sequencing (NGS) analysis.

[0473] An analysis of the NGS results in FIG. 47 indicates that the CasM.265466 D220R variant effector protein showed improved gene editing in primary human T cells relative to corresponding wildtype CasM.265466 effector protein.

### Example 47. CasM.265466 D220R Variant TRAC Gene Editing Studies in T Cells

[0474] The purpose of this study was to test CasM.265466 D220R variant effector protein (SEQ ID NO: 2601) for TRAC knockout relative to corresponding wildtype CasM.265466 effector protein (SEQ ID NO: 2435), and CasΦ.12 L26R variant effector protein (SEQ ID NO: 2592) in T cells. Cas9 effector protein was used as a positive control. The guide RNA for CasM.265466 D220R variant effector protein and corresponding CasM.265466 effector protein comprised a handle sequence of SEQ ID NO: 2522 linked to a spacer sequence of SEQ ID NO: 1986. The guide RNA for CasΦ.12 L26R variant effector protein comprised a guide RNA sequence of mC*mU*mU*UCAAGACUAAUAGAUUGCUCCUUACGAGGAGACGAGUCUCUCAGCUG GmU*mA*mC (SEQ ID NO: 2641). Briefly, 3×10⁵ activated T cells were electroporated with the guide RNA at a concentration of 500 pmol and the effector protein mRNA at a concentration of 0.5 μg, 1 μg, 2 μg, 5 μg, or 10 μg. After 72 hours post-transfection, the cells were processed by fluorescence-activated cell sorting (FACS) analysis and next generation sequencing (NGS) analysis.

[0475] An analysis of the NGS results in FIG. 48 indicates that the CasM.265466 D220R variant effector protein showed improved editing in primary human T cells relative to corresponding wildtype CasM.265466 effector protein and CasΦ.12 L26R variant effector protein.

The application's sequence listing, which the Patent Office published only in electronic form, follows.

SEQUENCE LISTING (2659 sequences)

SEQ ID NO: 1 - protein, 455 aa, synthetic construct
MAKKGTNRKKMIVKVMKYELKYESGCADFNEMQNELWKLQRQTREVMNRTIQLCYHWSYVQADYCKQHGCARRDVKPCDVYETNATSLDGYIYQLFKDEYPNFLMANLIATLRKAHQKYDALLFDIQEGNSSIPSFKKDQPLIFSKEAIRLPECLSDKRQITLFCFSKPYKSAHPTLDKITFAVRARSASEKSIFDHIISGKYALGESQLVYEKKKWFFLLSYKFTPESVDVNPEKVLGVDLGVVNALCAGSVENPHDSLFIKGTEAIEQIRRLEARKRDLQKQARYPGDGRIGHGTKTRVSPVYQTRDAIARMQDTLNHRWSRALIDFACKKGYGTIQMEDLSGIKALESEKPYLKHWTYFDLQSKIIYKAEEKGIRVVKVNPKCTSRRCSACGYISKENRKNQVEFLCVNCGYHHNADYNAAQNLSIPQIDRLIEKQLKEQESEENEAGANPK

SEQ ID NO: 2 - protein, 410 aa, synthetic construct
MAKGTLSKVMKYELRYLDGCGDFQNMQKELWTLQRQSREILNRTIQIAYHWDYTDREQFKKTGQHLDIKAETGYKRLDGYIYDSLKEDVQNFASVNVNATIQKAWAKYKSSKIDVLRGDMSLPSYKSDQPLVLHAQSMKIFSSDDDDVLQVTLFSNAYKKACNYSNIRFIIGLHDATQRTIIKKVLSGDWGIGQSQIVYKRPKWFLYLTYNFSPEQHEVNPDKILGVDLGESIAIYASSIGEYGSLRIEGGEISAFAKQLEARKRSLQKQAAYCGKGRIGHGTKSRVSDVYKMEDKIANFRNTVNHRYSKMLIDYALKHMYGTIQMEDLSGIKKETGFPKFLQHWTYYDLQQKIEAKAKEHGINFIKVDPAFTSQRCSKCGNIDSENRPSQAVFCCKKCGYKTNADFNAS

SEQ ID NO: 3 - protein, 426 aa, synthetic construct
MNVTKVMRYQLIYQGGGGDFESLQNQLWEFQRQTRAILNKTIQTMYLATANQEKFSEKALYHDLCAEYPDMISSTVNATLREATKKYRSSVREILAGRMSLPSYKRDHPILLHNQSVALKQGNQGSYFATISVFSRKYQQGTPGVKQPSFQLIAKDNTQRTILQRLLSGEYKLGQCQLIYIRPKWFLNVAYSFTPSEKALDQEKVLGVDLGCVYAIYASSYGNHGIFKISGDEITSFERKQAAIQNRAFKNDLTRIREIEERRKQKLEQARYCGEGRIGHGVKTRVAPAYQDEGKISRFRETINHRYSKALVDYAEKNGYGTIQMEDLSGIKSSTGFPKRLQHWTYFDLQQKIKYKAEEQGIKVVKIKPAYTSQRCSRCGHIDPANRKSQSEFKCIACGFSSNADYNASQNISMRNIEKIIQGKAN

SEQ ID NO: 4 - protein, 432 aa, synthetic construct
MAKGTITKVMKYELRYLGGFSDFHEMQKEVWQLQRQYREILNKTIQIALHWDYVSAQQFGESGTYLDIREETGYKTLDGYIYNCLKGAYSEMASANLNAAVQKAWKKYKNSKTQVLQGVMSLPSYKSDQPILIDKGNVKLSAEENNGRAVLTLFSRNYRDTRGLKGNVEFSVLLHDGTQKSIFRNLIDKTYALGQCQLVYERKKWFLLLTYSFTPAGHALDPEKILGVDLGECYALYASSCYAPGILKIEGGEIAEYALRLEKRKRSLQQQARYCGEGRIGHGTKTRVGVVYKAEDRIASFRETINHRYSKELVDYAVSNGYGTIQMEDLSAIQKDLGFPKRLRHWTYYDLQMKITNKAKEHGIAVVKIDPRYTSQRCSKCGHIDPANRPRQEEFCCTACGYACNADYNASQNISIKGIEKIIQKMLSAKAD

SEQ ID NO: 5 - protein, 435 aa, synthetic construct
MSKGMLTKVMKYTLRYVGGCGDFHEMQSILWELQKQTRAVLNKTIQIAFEWDYRSREAFQETGEYLDVHAETGYKRLDGYIYNCLKNEYADFAGKNLNAAIQTAWKKYNQSKRDIQTGKMSLPSYRSNQPLIIHNDNVMISQDMQAAPSVRFTLLSLEYKKAHDLNTNPTFEVLINDGTQRAIFEKVRSGEYKLGQCMIQYDKKKWFLLLTYSFQPEKLTLDKNKILGVDLGETIVICASSVSERGRFVIDGGEITRFATQIEARKRSQQHQAAYCGEGRIGHGTKTRVDAVYKTEDRIANFRDTINHRYSRALVNYAVKHGFGTIQMEDLSGIKSSDDFPKFLRHWTYYDLQSKIESKAKERGIAVVKVNPRFTSRRCSKCGYIDEGNRKDQAHFCCLSCGFRANADFNASQNLSIKGIDKIIEKEYNANSKQT

SEQ ID NO: 6 - protein, 442 aa, synthetic construct
MGKPITKTMKYQIHYIDGCGDFHNMQKELWDLQRIVRQILNKTINESYLWFVRSEQYYRDTGENLSVEEQTGYKTLDGHIYNLLKQEYTQKLVSNSLNASIQAAYKKMKDSRRDVMIGTMSLPSYRSDQPIIIYNKNIKFSSHPEHGFVVDCSLFSDAYKKSQGYEKSVKFQVSVDDNTQRSIFENILTGNYKHGQCSIVYEKKKWFLLLTYSFVPEETKLDPDKILGVDVGVVYALYASSKGNHGTFKIKGDEAITFIQRVEARKHSRQLQGTYCGDGRIGHGTKTRVQPVYNERALISNFQDTINHRYSKALIDYAKKNGYGTIQMEDLSGIKEVQQYPKYLQHWTYYDLQLKIQYKAKEAGIGFVKVTPKYTSQRCSHCGNIDEANRPKQDVFRCTVCGYERNADYNASQNLSIKGIDRIIDDQLKQMNKANPKKTENA

SEQ ID NO: 7 - protein, 435 aa, synthetic construct
MSGGAITKVMKYDLTYKDGYGNFKDMQEAVWKLIRDTRTILNETIKIAYHWDYLNEKSKRETGEHLDLLEETGYKRLDGYIYDDLKDRFPDFASSNLNAAIQTAWKKYKQSQKDVYIGKMTLPSYKSDQPLPINKQSIKIYDEEREHIVELNLFSTKHKKEHGLASNVRFRINLHDNTQHAIYERVLSGEYTLGQCQLLYDRPKWFFILTYSFKPAQNKLDPDKILGVDMGETCALYASTFGEQGSFVINGGEVSEYAKREEARKRSLQKQAAVCGEGRIGHGTKTRVSSVYKEQERISNFRDTINHRYSKALIEYAVKNGCGTIQMEDLSGIRQSTDFPKFLRHWTYYDLQQKIKTKAKETGIAVSMIDPRYTSQRCSRCGHIDKANRKDQAHFHCLKCGYSCNADFNASQNISIRGIDKIIQKELGAKAKQTD

SEQ ID NO: 8 - protein, 431 aa, synthetic construct
MKEIAKVMKYQLIYLDGGGDFYELQQTLWDLQRQTREILNKTIQSMYLATATNTAFEENALYHRFGAEYPMMAALNVNATLRTAKKRYTSTIKETLRGTMSLPSYKRDQPILLHNQTIHLALEDGQYSALFSVYSEKFQKAHEGVARPRFALMARDGTQRAILDRLLDGSYRLGQSQMTYEQKKWFLSLTYKFVPEVRELDKSKILGVDLGCVYAIYASSMQQKGIFKISGDEITEFEKRQAAMQNREPVSTLERVEQLEQRRWQKQQQARYCGEGRVGHGTGTRVAPAYRDADKIARFRDTINHRYSKALVEYAEKNGFGTIQMEDLSGIKEDTGFPKRLRHWTYFDLQTKIQYKAAERGITVVKIDPQYTSQRCSRCGYIDKANRASQEKFLCQSCGFEANADYNASQNISVEKIDKLIAKDKKKLART

SEQ ID NO: 9 - protein, 436 aa, synthetic construct
MGQVTKVMRYQLIYQDGGGDFYTVQQELWELQRQTREILNKTIQTMYLADANKEKFDNAAERTLNRRFCVDHPDMYTKTVTATLRKAKAKYNASQKEILAGRMSLPSYKRDQPILLNPQGFKIEEESDSFFAAIAVFSDKYKNKHPDVDVKRLRFRLVVKDGTQRAIIRRVISGEYKLGRSQLLYSKKKWFLNVTYSFEPAEKKVDPDKILGVDLGCVYAIYASSFGSPGVFKISGDEVSSFERKQAAIQNRSPKSTLERVEKIEERHKQKQQQARYCGEGRIGHGTKTRIAPVYQDEDKIARFRDTVNHRYSKALIDYAEKNGYGTIQMEDLSGIKSATGFPKRLKHWTYYDLQTKIEYKAEERGIKVVKIDPRYTSQRCSRCGYIDSGNRKSQAEFCCMACGFSCNADYNASQNISIGGIAKIIADKRKEADAK

SEQ ID NO: 10 - protein, 368 aa, synthetic construct
YLDIREETGYKTLDGYIYNCLKGAYSEMASANLNAAVQKAWKKYKNSKTQVLQGVMSLPSYKSDQPILIDKGNVKLSAEENNGRAVLTLFSRNYRDTRGLKGNVEFSVLLHDGTQKSIFRNLIDKTYALGQCQLVYERKKWFLLLTYSFTPAGHALDPEKILGVDLGECYALYASSCYAPGILKIEGGEIAEYALRLEKRKRSLQQQARYCGEGRIGHGTKTRVGVVYKAEDRIASFRETINHRYSKELVDYAVSNGYGTIQMEDLSAIQKDLGFPKRLRHWTYYDLQMKITNKAKEHGIAVVKIDPRYTSQRCSKCGHIDPANRPRQEEFCCTACGYACNADYNASQNISIKGIEKIIQKMLSAKAD

SEQ ID NO: 11 - protein, 437 aa, synthetic construct
MAEKTIVKVMKFELRYIDGAGEFSEMQKHLWELQKQTREVLNKTIQMGYALECKRFAHHDKTGQWLDDKELTGSKYKAVADYINAELKEDYNIFYSDCRNSTVRKAYKKFKDAKNKIFSGEMSLPSYRSNQPIIIHNRNVIIRGNAESALVGLKVFSDGFKALHGFPAAVNFKLCVKDGTQRAIIENVISEIYKISESQLIYDNKKWFLILAYRFTQKKNDLNPDKILGVDLGVKFAVYASSIGEYGSFRIKGGEVTEFIKRLEKRKKSLQNQATVCGDGRIGHGTKTRVADVYKARDKISNFQDTINHRYSRAIVDYARKNGYGTIQLEKLDNSIEKKGDYSPVLVHWTYYDLRTKMEYKAAEYGIKVIAVEPKYTSQRCSKCGYISSENRKTQESFECIKCGYKCNADFNASQNLSVRDIDRIIDEYLGANPELT

SEQ ID NO: 12 - protein, 434 aa, synthetic construct
VVNVAKGALSKVMKFELSYLDGCGDFQNMQKELWTLQRQTREILNRTIQIAYHWDYTDREHFKKTGQHLDVKSETGYKRLDGYIYDELKETVQNFASVNVNATIQKAWAKYKSSKTDVLRGDMSLPSYKSDQPLVLHAQSIKLSEDKDGPVLQVTLFSNAHKKACDYSNVRFAFRLHDATQRAIFKNVLSGEYGLGQSQIVYKRPKWFLYLTYNFSPEQHGLDPDKILGVDLGESIALYASSLGDYGSLRIEGGEVTAFAKQLEARKRSLQKQAAHCGEGRVGHGTRARVSDVYKAEDKIANFRNTVNHRYSKKLIEYAIQNRYGTIQMEDLSGIKQDTGFPKFLQHWTYYDLQQKIEAKAKENGINFIKVDPSYTSQRCSKCGNIDSDNRPSQAVFCCTKCGFRANADFNASQNLSIPEIDKIIKKERGANTK

SEQ ID NO: 13 - protein, 455 aa, synthetic construct
MAKKGTNRKKMIVKVMKYELKYEKGCADFNEMQNELWKLQRQTREVMNRTVQLCYHWNYVQADYCKQHGCAHRDVKPCDVYETNATSLDGYIYQLFKDEYPNFLMANLIATLRKAHQKYDALLPDIQEGNSSIPSFKKDQPLIFSKEAIHLPECLSDKRQITLFCFSKPYKSAHPTLDKITFAVRAHSASEKSIFDNIINGKYALGTSQLVYEKKKWFFLLSYKFTPESVDVNPEKVLGVDLGVVNALCAGSVENPHDSLFIKGTEAIEQIRRLEARKRDLQKQARYPGDGRIGHGTKTRVSPVYQTRDAIARMQDTLNHRWSRALIDFACKKGYGTIQMEDLSGIKAMESEKPYLKHWTYFDLQSKIIYKAEEKGIRVVKVNPKCTSRRCSACGYISKENRKNQAEFLCVNCGYHHNADYNAAQNLSIPQIDRLIEKQLKEQESEESEAGANPK

SEQ ID NO: 14 - protein, 500 aa, synthetic construct
MTERHDNESSKIKAEVSLLNSSVPDFEKKRHVKVLKLHILKPAGDMKWDELGALLRDARYRVFRLANLAISEAYLDFHKWRSGGNEQPKLKISQLNRNLRSMLEDEVTGKQTKMIKSDRYSKSGALPDSIVSPLSMYKLGGLTSKSKWSEVLRGKSSLPTFKLNMAIPVRCDKPGDRRIERTKNGDAEVELRICLQPYPRVIIATGRNSLGDGQRAILDRLLDNTKYSEQGYRQRCFEIKEDQRSGKWHLFVTYDFPAIEPAKNLSRERIVGVDLGAACPLYAAINTGHARLGWKHFSPLAARVRALQNQTIRRRRQILRGGKVSLSEDSARSGHGRKRKLKPISKLEGKIDRAYTTLNHQLSATVIKFAKDNGAGVVQMEDLKGLRETLTGTFLGERWRYEELQRFIRYKADEAGIEIRLVNPQYTSRRCSECGHIHKDFTREFRDKSREGNKSVRFLCPDCGFTADPDYNAARNLASLDIAAIIERQLEIQGLRKHDP

SEQ ID NO: 15 - protein, 471 aa, synthetic construct
MKEKSKTLVKVARLRILKPAGDMKWSELGEMLRTVRYRVFRLANLAVSEAYLGFHMYRTNRATEFKAETIGKLSRRLREMLIEEGVDEKDLSRYSQTGAVPDTVAGALGQYKIRGITSPTKWRQVVRGQAALPTFRNDMAIPIRCDKQYQRRLEKTEAGEIEVELMICRKPYPRIVLGTADLGPGQRAILERLLQNTDNSADGYRQRLFEAKQDTQTKKWWLYVTYDFPRLKEGKLNQEIVVGVDLGFSIPLYVALNIGHARLGRRHFQALGNRIRSLQRQVLARRRSIQRGGRVNISHSTARSGHGRKRKLLPTEKLRGRIEKSYSTLNHQLSASVIDFAKNHHAGTIQIEDLANLKEELAGTFIGARWRYHQLQQFLKYKAEEAGITLNQVNPRYTSRRCSECGFINIDFDRAFRDAGRTEGRVTKFLCPECGYEADPDYNAARNISILDIDKLIRVQCKKQGLTYDAH

SEQ ID NO: 16 - protein, 475 aa, synthetic construct
MPERPKTVNKVIWFQIHKPAGDMTWKELGNLLREARYRVFRLANLAVSEKYLSFHMWRTGQEYKSETIGKLNRRLREMLIEEGVEEESQKRFSATGALPDTVVSTLAKGKLAAITSKSKWKDVVNGKTSLPTFKLNMAIPVRCDKAEQRRLRRTESGDVELELMICKQPYPRVVLKTGKLKSGQRAILDRLVENNDNSKEGYSQRVFEIKQVENNDGSKEWRLYISYTFPKKAVEANADVAVGVDIGFSVPLVAAVNNGLERLGYNDFRALNERIRSLQRQVLVRRRSMQSGGRDYVSTPTARSGHGRKRKLLPIQTLRKRWDNAYTTLNHQLSHAVVSFAENHGAATIQIENVKSLKDELRGTFLGQRWRYFELQQFLKYKADEVGIELREVNARYTSRRCSECGYINMAFTRQARDKGRVDGKPMEFVCPECGYKAHPDYNAARNIAMLDIEQKMQVQCKQQGITYADDSEVL

SEQ ID NO: 17 - protein, 448 aa, synthetic construct
MTWPELGNMLRTVRYRVFRLANLAVSEAYLGFHMFRTKRAEEFKAETMGKLSRRLREMLIEEGVDEKDLSRYSQTGAVPDTVAGALSQYKIRGITSPTKWRQIVRGQVALPTFRNTMSIPVRCDKLYQRRLEQGDSGEVEVELMICRNPYPRVVLGTGDLNPGQQAILERLLQNTDNSADGYRQRLFEIKEDVQTRKWWLYVTYDFPKTTGKLNPEIVVGVDLGFSIPLYVALNSGHARLGYLHFKALGERIKSLQKQVMARRRAIQRGGRVSISHSTARTGHGVKRKLQPTEKLRGRIEKSYSTLNHQLSASVIDFAKNHHAGVIQIEDLSGLKEQLTGTFIGARWRYHQLQQFLKYKAEEAGITLKQINPRYTSRRCSECGFINMDFDRAFRDAGRTYGKVTKFLCPECGYEADPDYNAARNIATLDIEKLIRVQCEKHGLKFDAH

SEQ ID NO: 18 - protein, 477 aa, synthetic construct
VGKEGKRNVKVMKIRILKPCDGMTWNELGQLLRDARYRVFRLANLTVSEAYLNFHLWRTGRSQEFKKQTIGQLNRQLRNILQQEKYDDEKLNRYSKTGALPDTVCSALWQYKLMAVMKKSKWSEVIRGKSSLPTFRNDMAIPVRCDKPEQKRIEKTEQGQVEAALQVCVQPYPRVILGTHTLGDGQDAILKRLLDNQNQAIGGYRQRSFEIKYDEQKRWWLFITYDFPATEVATDKTIAVGVDLGVSVPLYAAVNNGPARLGRREFGGLGRRIRDLRNQTDARRRSIQRSGREGQSDDTARAGHGRKRKLLPIHILEGRLDKAYTTLNHQMSAAVIKFAAEQGAGIIQIENLAGLQDELRGTFIGGRWRYRQLQDFLKYKTQEMGIELRQVNPKYTSRRCSKCGFIHKDFDRDYRNRHSENGKPAQFVCPNPDCKYESDPDYNAARNLATLDIEEQIRVQCQKQGLEYDSKKDKNAL

SEQ ID NO: 19 - protein, 472 aa, synthetic construct
MKEKSKTLVKVARLRILKPAGDMTWSELGEMLRTVRYRVFRLANLAVSEAYLGFHMFRTQRAAEFKAETMGKLSRRLREMLIEEGVDEKELNCYSLTGAVPDTVAGALHQYKIRGITSPTKWRQVVRGQAALPTFRNDMSIPIRCDKPYQRRLEKTEAGEVEVELMICRKPYPRIVLGTADVGPGQEVILERLLQNKDNSSDGYRQRLFEAKQDRQTGKWWLYVTYDFPRPEEGELNPEIVVGVDLGFSVPLYVAINNGYARLGRRHFQALGNRIRSLQRQVLARRRSIQRGGRVNISHDTARSGHGIKRKLLPTEKLRGRIEKSYSTLNHQLSASVIDFTKNHHAGTIQIEDLANLKEVLAGTFIGARWRYHQLQQFLKYKADEAGITLKEVNPRYTSRRCSECGFIHKDFDRAFRDSGRTDGKVARFVCPECGYGPVDPDYNAAKNISTLDIEKHIRVQCKKQGLEYEVH

SEQ ID NO: 20 - protein, 470 aa, synthetic construct
MKEKAKTLVKVARLRILKPAGDMTWPELGNMLRTVRYRVFRLANLAVSEAYLGFHMFRTKRAEEFKAETMGKLSRRLREMLIEEGVDEKDLSRYSQTGAVPDTVAGALSQYKIRGITSPTKWRQIVRGQVALPTFRNTMSIPVRCDKLYQRRLEQGDSGEVEVELMICRNPYPRVVLGTGDLNPGQQAILERLLQNTDNSADGYRQRLFEIKEDVQTRKWWLYVTYDFPKTTGKLNPEIVVGVDLGFSIPLYVALNSGHARLGYLHFKALGERIKSLQKQVMARRRAIQRGGRVSISHSTARTGHGVKRKLQPTEKLRGRIEKSYSTLNHQLSASVIDFAKNHHAGVIQIEDLSGLKEQLTGTFIGARWRYHQLQQFLKYKAEEAGITLKQINPRYTSRRCSECGFINMDFDRAFRDAGRTYGKVTKFLCPECGYEADPDYNAARNIATLDIEKLIRVQCEKHGLKFDAH

SEQ ID NO: 21 - protein, 468 aa, synthetic construct
MAKKAKTMFKVTNFRILKPAGDMTWKELGQLLRDARYRTFRMANLALSEAYLNFYLLKKGDLKEYKNVKIGQIAKRLRDMLIEEGVDEEVQNRFSPKVALPAYVYSALDQFKLRGLTSKSNWKKVLRGQASLPTFRLNMSVPIRCDKPEHRRLEKTENGNVEVDLMICRKPYPRVVLETLKLDGSSKAILDRLLENEDNSPGNYRQRCFEVKQNPRSNDWWLYVTYEMPVDKDKKLDPKVIVGVDLGFSVPLYVAINNGHARLGRRHFQALGKRIHNLQNQVLARRRSIQRGGQVNLSHSTSRSGHGRKRKLQPTEKLQQKINSAYSTLNHQLSSSVIDFANNHKAGTIQIEDLETLKEQLTGTYIGRQWRYYQLQQFIEYKAKENSITVKKINPKYTSRRCSMCGHIHADFDRTFRDRSSNKGFVTKFICPECNFEADPDYNAAKNISTLDIENKIKLQCKKQKIDY

SEQ ID NO: 22 - protein, 457 aa, synthetic construct
MPKITRKIELLFDRSGLSEEECKEKWRFIYQINDNLYRVANRLVNQLYLADEIDDILRLSDQEYIALRKKLANKKLDEATRISLEEQMSQVMKRVNERRSAILQRPQQSFAYSVVTDSDTEGLTAKILDVLKQDVLSHYKADTKEVLKGEKSISNYKKGMPIPFAFNDSLRLYKEDGFFYLKWYNGIRFLLNFGRDASNNQLIVERCLGISKDEISYKACSSSIQIKKKGNHSKIFLLLVVDVPVEQYAQKPNMVVGVDLGLNVPIYAASNSTLERKAIGSREAFLNQRGAFQRRFRALQRLQTTKGGRGRLHKLEPLERVREAERNWVRTQNHLFSREVINFAIDVGASTIQMEKLANFGRDAQGEVREDKKYVLRNWSYFELQNLIEYKAKRAGIKVKYINPAFTSQTCSECGQLGERDSIHFKCTNPDCPNCGKDIHADYNGARNIAKSKDYIK

SEQ ID NO: 23 - protein, 468 aa, synthetic construct
MPTITRKIELTLLTEGLSEEQRKEQWGLLYHINDNLYKAANNISSKLYLDDHVSSMVRMKHAEYLSLLKELARAEKQKTPDADAIAELRKKVAAAEKEMTDQEHAICKYATEMSTQSLSYRFATELETNIFAKILDCLKQGVFATFNSDARDVKRGERAIRNYKKGMPIPFAWDKSLRIEKDNKDFYLRWYNGLRFLFNFGKDRSNNRLIVERCLKMDADYDGEYKLCNSSIQIAKREGKTKLFLLLVVKIPQEHVELNKKVVVGVDLGINVPAYVATNITEERKAIGDREHFLNSRMAFQRRYKSLQRLRGTAGGKGRAKKLEPLERLRKAEHNWVHTQNHLFSREVVDFAVKSHAATIHMEDLSGFGKDNDGNADERKEFVLRNWSYYELQNMIAYKAAKYGIKVEKIHPAYTSKTCSWCGQLGFREGVTFICENPECKQCGEKVHADYNAARNIANSKDIIKKNE

SEQ ID NO: 24 - protein, 468 aa, synthetic construct
MPTITRKIELTLCTDGLSEEQRKEQWGLLYHINDNLYKAANNISSKLYLDDHVSSMVRMKHAEYLSLLKELARAEKQKTPDADAIAELKKKVAATEKEMTDQEHAICKYATEMSTQSLSYRFSTEFETKIFAKILDCLKQGVFATFNSDAKDVKRGERAIRNYKKGMPIPFAWTDSLRIKKDNKDFYLLWYNGLRFLFNFGKDRSNNRLIVERCLKMDADYDGEYKLCNSSIQIAKREGKVKLFLLLVVSIPKEHVELNKKVVVSVDLGINVPAYVATNITEERKAIGDREHFLNSRMAFQRRYKSLQRLKGTTGGKGRTKKLEPLERLRKAEHNWVHTQNHLFSREVVDFAVKTHAATIHMEDLSGFGKDNDGNADERKEFVLRNWSYYELQNMISYKAAKYGIKVEKIRPAYTSKTCSWCGQHGFREGVTFICENPACKQCGEKVHADYNAARNIANSKEIIKKNE

SEQ ID NO: 25 - protein, 469 aa, synthetic construct
MPTITRKIELTLCTEGLSDQERKDQWNLLYHINDNLYRAANNISSKLYLDDHVGSMVRLKHAEYLSLLRALEKAKKQKAPDEEVIAELSQQVATAEQEMDEQAKAICQYATEMSTQTLSYRFATELETNIFGQILTCLRQGVFSTFNSDARDVKRGERSIRTYKKGMPIPFPWNDSLRIGFEDGEFYLRWYNGLRFRFDFGKDRSNNCLIVQRCMKMDKDYEGDYKLCNSSIQMVKREGKPKFFLLLVVNIPQERVELNKNIVVGVDLGINAPAYVATNTTPERKQIGDREHFLNERMAFQRRFKSLQRLKGTTGGRGRAKKLEPLERLRKAEQNWVHTQNHLFSREVIDFAVKARAATIHMEDLSGFGKDNDGNADERKEFVLRNWSYYELQNMITYKAAKYGIKVEKIRPAYTSKTCSWCGHQGFREGITFICENPECKKFGEKEHADYNAARNIANSKEIIKNNEE

SEQ ID NO: 26 - protein, 468 aa, synthetic construct
MPTITRKIELTLLTEGLSEEQRKEQWGLLYHINDNLYKAANNISSKLYLDDHVSTMVRMKHAEYLSLLRELARAEKQKKPDVDAIAELREKVTAAEKEMSDQERAICTYATEMSTQSLSYRFATEIETNIFAKILDCLKQGVFATFNSDARDVKRGERAIRNYKKGMPIPFAWDKSLRIEKDNKDFYLRWYNGLRFLFNFGKDRSNNRLIVERCLKMDADYDGEYKLCNSSIQIVKREGKVKLFLLLVVSIPQEHVELNKKIVVGVDLGINVPAYVATNITEERKAIGDREHFLNSRMAFQRRYKSLQRLKGTAGGKGRTKKLEPLERLRKAEHNWVHTQNHLFSREVVDFAVKSHAATIHMEDLSGFGKDNDGNADERKEFVLRNWSYYELQNMIAYKAAKYGIKVERIRPAYTSKTCSWCGQLGFREGVTFICENPECKQCGEKVHADYNAARNIANSKDIIKKNE

SEQ ID NO: 27 - protein, 463 aa, synthetic construct
MPTMTRKIELKLCTEGLSDEERKAQLGLLYHINDNLYKAANNISSKLYLDDHVSSMVRLKHAEYLSLLNEFEKAKKKGDEEQIVELSLRVAAAEKELTDQELAICKYATEMSTDTLAYRFANEIEINVFGQILACLKQGIHSTFKKDAADVKRGERAIRNFKKGMPIPFPWSKSIRIENEGSDFYLRWYNGLRFRFDFGKDRSNNRLIVSRCLNLDPDFEDEYKLSNSSLQMVKRDGRPKLFLLLVVNIPQENVELNKKIVVGVDLGINSPAYVATNITMERQRIGSRDTFLNARMAIQRRFQSLQKLQNTAGGRGRKKKLEPLERLKETERNWVRTQNHLFSRDVVQFAVKTRAATIHMEDLSGFGKDDDGNADEKKEFVLRNWSYYELQTMIKYKAAKYGIKVEKIRPAYTSRTCSWCGHEGDRKGETFICENPECEKYGKKENADYNAARNIANSTDIIK

SEQ ID NO: 28 - protein, 468 aa, synthetic construct
MPTITRKIELTLCTEGLSDEQRKEQWGLLYHINDNLYKAANNISSKLYLDEHVSSMVRMKHAEYLSLLKELARAEKQQTPDEGLIAELSRKLSAAEKEMADQELAICKYATEMSTQTLSYNFAKEIETNIFGQILTCLRQGVYATFNSDAKDVKRGERAIRNYKKGMPIPFPWNNSLKIESDSGEFYLRWYNGLRFLLTFGKDRSNNRMIVNRCMKMDEDFEGEYKLCNSSIQLAKRDGKPKLFLLLVVNIPQEHVKLNKKIVVGVDLGVNVPAYVATNITEERKAIGDREHFLNTRMAFQRRYKSLQRLKGTAGGKGRTKKLEPLERLRDAERNWVHTQNHLFSREVVNFAVQARAATIHMEDLSGFGKDKDGNADEKKEFVLRNWSFYELQNMIAYKSAKYGIKVVKIRPAYTSKTCSWCGQQGDRKSTTFICENPKCKHYGESIHADYNAARNIANSNDIVKENE

SEQ ID NO: 29 - protein, 467 aa, synthetic construct
MPKITRKIEMTLCTEGLSDEQRKEQWGLLYHINDNLYKAANNISTKLYLDEHVSSMVRMKHADYLSLLKELAKAEKKSPDEDLIAELREKLAAAEQEMTDQELAICKYATEMSTQTLAYKFATEIEINVFGQILACLKQAAQSNFKSDAKDVKRGERAIRNYKKGMPIPFPWNDNIRIDADGDEFYLRWYNGLRFHLTFGKDKSNNRMIVKRCLKMDKDFEGEYKLCNSSIQMVKRDGKPKLFLLLVVNIPQEHVELNKNVVVGVDLGVNVPAYVATNITEERKAIGEREHFLNTRMQIQRRYKSLQRLKATAGGKGRTKKLEPLERLRKAEHNWVHTQNHLFSREVVNFAVQTHAATIHMEDLSGFGKDDDGNADEQKEFVLRNWSFYELQNMIAYKAAKYGIKVEKVKPAYTSKTCSWCGQLGFRQGVTFICENPACKQCGEKVHADYNAARNIANSKDIIKKNE

SEQ ID NO: 30 - protein, 469 aa, synthetic construct
MPTITRKIELHLCTDGLTDEQQKAQRLLLYHINDNLYKAANNVSSKLYLDEHVSSMVRLKHDEYLSLSRELARAEKKHDDELTTELRGKLAAAEREMTDQELAICKYATEMSTQSLSYRLVTELETKIFAKILDCLKQGVYATFNSDARDVKRGERAIRNYKKGMPIPFAWNDSVRIEYDEKEKDFYLRWYNDIRFKFHFGRDRSNNRLIVSRCLKLDKDYEGDYQLCNSSIQIVKRDGSTKFFLLLVVKIPQEHVELNKRIVVGVDLGINYPAYVATNCTEERMYIGDREHFLNTRMQFQRRYKSLQKLKGTAGGKGRSKKLEPLERLRNAERNWVHTQNHLFSLKVVNFAVQTHAATIHLEDLSGFGKDDDGNADERKEFVLRNWSYYELQSMIEYKAKKYGIKVEKIRPAYTSQTCSWCGQRGFRQGVTFICENPECKKCGEKENADYNAARNIANSKDVIKDKNE

SEQ ID NO: 31 - protein, 491 aa, synthetic construct
TPFVLYFQNYSLSLRQHITLYSMPTITRKIELTLCTEGLSDQERKDQWNLLYHINDNLYRAANNISSKLYLDDHVGSMVRLKHAEYLSLLRAMEKAKKQKAPDEEVIAELSQQVAAAEQEMDEQAKAICQYATEMSTQTLSYRFATELETNIFGQILTCLRQGVFSTFNSDARDVKRGERSIRTYKKGMPIPFPWNDSLRIGFEDGEFYLRWYNGLRFRFDFGKDRSNNRLIVQRCMKMDKDYEGDYKLCNSSIQMVKREGKPKFFLLLVVNIPQERVELNKNIVVGVDLGINAPAYVATNTTPERKQIGDREHFLNERMAFQRRFKSLQRLKGTTGGRGRAKKLEPLERLRKAEQNWVHTQNHLFSREVIDFAVKARAATIHMEDLSGFGKDRDGNADERKEFVLRNWSYYELQNMITYKAAKYGIKVEKIRPAYTSKTCSWCGHQGFREGITFICENPECKKFGEKEHADYNAARNIANSKEIIKNNEE

SEQ ID NO: 32 - protein, 469 aa, synthetic construct
MPTITRKIELHLCTEELSDEQQKAQRLLLYHINDNLYKAANNVSSKLYLDEHVSSMVRLKHDEYLSLLRELARAEKKADDELATQLREKLVAAEREMTDQELAICKYATEMSTQSLSYRFVTELETKIFAKILDCLKQGVYATFNSDSRDVKRGERAIRNYKKGMPIPFAWDKSVRIEYEEKEKDFFLRWYNDIRFKFHFGRDRSNNRLIVSRCMKLDKDYEGDYQLCNSSIQIVKRDGSTKYFLLLVVKIPQEHVELNKKIVVGVDLGINYPAFAATNCTEERMSIGDREHFLNTRMQFQRRFKSLQRLKGTTGGKGRNKKLEPLERLRKAEHNWVHTQNHLFSLKVVNFAVQAHAATIHLEDLSGFGKDDDGNADERKEFVLRNWSYYELQNMIKYKAKKFGIQVEKIRPAYTSQTCSWCGQRGFRQGITFICENPECKKCGEKENADYNAARNIANSKDIIKDKDE

SEQ ID NO: 33 - protein, 460 aa, synthetic construct
MPIITRKIELHISKEGLSAEDYKAQWQYLRQINDNLYMAANRVSSHCFLNDEYKYRLCLQIPDYIDIEKQLKDSKRARLSKEELGQLKKRKKELENTVKGRFQDEFEKNSLYTIISNEFGEIIPGQILTCLRQCVQSKYNRAKEELEKGERAISTYKKGMPIPFPINKSIRLQKQGEDFVLKWYNKIVFKLHFGRDRSNNRVIVERLIQSALNDKQKGEDYVMNNSSIQLVEKDKMTKIFLLLSMDIPTQKRKLDSELVLGVDLGLNFPLYYATNQSANIHDHIGDKDIFLKERMVFQRRFKELQRLQCTQGGRGRKKKLEPLEKLRDKERNWVRTKNHIFSREVIKVALHLGAGTIHLENLHNFGKDGNGELKNSKKFVFRNWSYFELQSMIEYKAKMEGITVKYVNPAYTSQTCSVCGMIGERKEQAVFRCMNSSCLEYGKEVNADFNAARNIAKAKM

SEQ ID NO: 34 - protein, 466 aa, synthetic construct
MPTITRKIELTLCTDGLSDDLRKDQWQLLYHINDNLYKAANNISSKLYLDEHVASMVRLKHAEYLGLIKELAKARKRADDEAVRDLCSKLAVAEQEMNEQAKAICDYATEMSTQTLSYNFAKEIETNIFGQILTCLRQGVLLNFNSDARDVKRGERAIRNYKKGMPIPFPWNDTIKIVSEGDEFYLRWFSGLRFHLNFGKDRSNNRMIVRRCLKMEQDFDEEYKISNSSIQVAKRDGKQKLFLLLVVQIPQEQVVLNKKIVVGVDLGVNVPAYVATNITEERKAIGDREHFLNTRMQFQRRYKSLQRLKTTEGGRGRAKKLEPLERLRKAEHNWVHTQNHLFSREVVNFALQTQAATINMEDLSGFGKDNDGNADECKEFVLRNWSYYELQNMIVYKASKYGIRVQKIRPAYTSKTCSWCGHMGFREGVTFICENPDCKQFGEKVHADYNAARNIANSKEIIKNDE

SEQ ID NO: 35 - protein, 444 aa, synthetic construct
MSKTVTKTVKIALICEHTNKYGEKVDYKDINKLLWKLQKQTRELKNKTIQLCWEYNNFSCDYYKEHHEYPNMEDILKYKRINGFVENKLKTVNDLYSSNCSTTILSTCNEFQNYRSEFLKGTRSINSYKSDQPLDLHKGAIKLEHDGKDFYVSLKLLKRSAFNAMEFKGSDIRFKLNVKDKDKSTLKILESCYDKIYSISASKMTYDRKAGKWFLLLAYSFTPAKTENLDPEKILGVDLGIKIPICASVYGDLDRLTIEGGKIEEFRRRVEARKRSLQKQGKQCGDGRIGHGTKKRIKPITDIGDKIARFRDTENHIYSRYLIEYAVKKGCGTIQMEKLEGITREKDIFLKNWTYFDLQKKIEYKAKEKGIKVVYIEPAYTSKRCSSCGFIDTDNRLDQAHFKCLKCGFNENADYNASQNIGIKNIDKIIKEEHKSASDKLTSE

SEQ ID NO: 36 - protein, 439 aa, synthetic construct
VIILTKVVKLYLISEQINKEGQKIDYQRINSILWDLQKQTRDIKNRTVQLCWEWMNFSSDYCKTQEEYPKERDILGYTLEGYVYDYFKTGYDLYTGNISTSSREVCSSFKNVKKEILKGERSILSYKANQPLDLHKKAISLEYDNFNFFVKLKLLNRTGKKKYDITEDINFKIQVNDKSTRTILERCYDKEYKISGSKLIYEKKKKLWRLNLCYSFENSQVETLEKDKILGIDLGIVYPLMASIYGEYDRFSIKGGEIEEFRRRTEARKRSILQQTKYCGDGRIGHGRNKRTQPAYKINDKIARFRDTANHKYSRALIEYAVKKNCGIIQMENLTGISDNTDCFLKDWSYYDLQTKIENKAKEMGIKVVYIKAQYTSQRCSRCGYIDVNNRIRQALFKCQNCGYETNADYNASQNIGMYDIENIIEETLKIQSANVKQS

SEQ ID NO: 37 - protein, 437 aa, synthetic construct
MTKVTKVYLISEQIDKDGNKIDFKKISELLWNLQMQTRDIKNKCVQLCWEWLNFSSDYYKKSEEYPKEKDTLGYTLSGFVYDRIKNGSDLYSSNLSTSSRDTCTAFSNYKKEMLKGERSVLSFKANQPLDIHNKAIKLSYENGNFFVALKMLNRAGKEKYGIKDDLRFRMQVRDKSVRTILERLMNDEYKVSASKLMYDKKKKLWKLNLCYSFDNHVISTLDTEKIMGVDLGVVYPIMASVNGDYARFSIKGGEIEAFRSRVEARRRSLLNQSRYCGDGRIGHGRKKRTEPATQIADKIARFRDTTNHKYSRALIDYAIKNGCGTIQMEKLTGITSSAEHFLKEWSYFDLQTKIESKAKEAGIKVVYINPKFTSQRCNKCGYIHTDNRPVQARFCCQKCGYEENADYNASQNIGTKHIDVIIEETLKMQCEPETPTE

SEQ ID NO: 38 - protein, 428 aa, synthetic construct
MNKVVKLALICEQSDKDNSPVDYKKINEILWELQKQTREIKNKAIQYCWEYNNFSSDYYKKFNEYPKEKDILSYTLVGFVNDKFKTGNDLYSGNCSTTVRNACTEFKNSKKELIKGSRSIINYRSNQPLDIHNKCIRIEFENNCFYTYLKLLNRPAFKKYNFANTEIKFKILVRDNSTKTILERCISNEYEIAASKLLYDQKKKCWFLNLVYAFEIKSNNSLDPNKILGVDLGIHYPICASVYGSLDRFTIDGGEIDEFRRRVESRKISMLKQGKNCGDGRIGHGIKARNKPVYNIEDKIARFRDTANHKYSRALIEYAVKHTCGTIQMEDLTGITDIANRFLKNWSYYDLQTKIEYKAKEAGINIVYIDPKNTSRRCSKCGYIDKENRETQSRFICLKCGFKENADYNASQNIGIKDIDKLIKEDVH

SEQ ID NO: 39 - protein, 443 aa, synthetic construct
VTLLVKVVKIYLISEQFDKAGNQIDYKEVNKILWELQKQTREAKNKTVQLLWEWNNFSSDYVKASGIYPKAKDIFGYSSVHGQANKELRTKLALNSSNLSTTTMDVCKIFNTYKKEVWEGKRSVPSYKSDQPLDLHKESIKLIYENNEFYVRLALLKKAEFAKYGFKDGFRFKMQVKDNSTKTILERCFDEVYKINASKLLYDQKKKKWKLNLSYSFDNKNISELDKEKILGVDVGVNCPLVASVFGDRDRFIIKGGEIEKFRKSVEARRRSMLEQTKYCGDGRIGHGRKKRTEPALNIGDKIARFRDTTNHKYSRALIEYAVKKGCGTIQMEKLTGITSKSDRFLKDWTYYDLQTKIENKAKEVGINVVYIAPKYTSQRCSKCGYIHKDNRPNQAKFRCLECDFESNADYNASQNIGIKNIDKIIEKDLQKQESEVQVNENK

SEQ ID NO: 40 - protein, 428 aa, synthetic construct
MNKVVKLALICEQSDKNNSPVDYKKVNEILWELQKQTREIKNKTIQYCWEYYNFSSDYYKKFNKYPKEKDILSYTLWGFINDKFKTGNDLYSGNCSATTKKVIKEFKNSKKELIRGSRSIINYKSNQPLNIHNKCIHLQFKNNNFYVSINLLNRRSFKKYNFANTAIKFKILVRDNSTKAILERCISNEYKISESQLIYNKKKKCWFLNLSYAFEIKSNNSLDPNKILGVDLGIHYPICASVYGSLDRFTIDGGEIDEFRRRVESRKISMLKQGKNCGDGRIGHGIKARNKPVYNIEDKIARFRDTANHKYSRALIEYAVKNNCGTIQMEDLTGITDNANRFLKNWSYYDLQTKIEYKAKEASINVVYINPENTSRRCSKCGYIDKENRKTQSSFICLKCGFKENADYNASQNISIKDIDKLIKEDVH

SEQ ID NO: 41 - protein, 443 aa, synthetic construct
VTLLVKVVKIHLISEQFDKAGNRIDYEEVNKILWELQKQTREAKNKTVQLLWEWNNFSSDYVKASGIYPKAKDIFGYSSVHGQANKELRTKLALNSSNLSTTTMDVCKNFNTYKKEVWKGKRSVPSYKSDQPLDLHKDSIKLIYENNQFYVRLALLKKAEFAKYGFKDGFHFKMQVKDNSTKTILERCFDEVYKINASKLLYDQKKKKWKLNLSYSFDNKNISELDKEKILGVDVGVSYPLVASVFGDRDRFKIKGGEIEKFRKSVEARRRSMLEQTKYCGDGRIGHGRKKRTEPALNIGDKIARFRDTTNHKYSRALIEYAVKKGCGTIQMEKLTGITSKADRFLKDWTYYDLQTKIENKAKEVGINVVYIAPKYTSQRCSKCGYIHKDNRPNQAKFRCLECDFESNADYNASQNIGIKNIDKIIEKDLQKQESEVQVNENK

SEQ ID NO: 42 - protein, 449 aa, synthetic construct
LIWKDALGGIILTKIVKLYLISEQIDKDGNRVDYKEINSILWNLQKQTRDIKNKTVQLCWEWMNFSSDYYKKNELYPNEKEILNLTLRGYAYDHFKQGYDLYSSNISVLTEAVCGAFKNAKKEMLNGEKSVLSYKAEQPLDIHKKCIKLEYDKNFYVKLKMLNKAGKKKYGIEDDLNFKIQVEDKSTRTILERCIDGEYVVSGSKLIYDKKKKLWKLNLCYSFKANEIESLDKNKILGIDLGIACPLMASVNGEFDRFSIKGGEIETFRKRIEARKRSVLHQTKYCGDGRIGHGRNKRTEPAYKINDKIARFRDTANHKYSRALIDYAIRKNCGMIQMENLTGISDKKEHFLKEWSYYDLQTKIENKAKEKGIKIVYINPEYTSQRCSKCGYIDANNRELRAVFKCQKCGFEADADYNASQNIGIKNIEDIIENTLKISSANEKQTKNT

SEQ ID NO: 43 - protein, 462 aa, synthetic construct
VFYSTFLCYILTKYIDFSANECYNINTSSEVKQLMNKVVKLALICEQSDKDNSPVDYKKINEILWELQKQTREIKNKAIQYCWEYNNFSSDYYKKFNEYPKEKDILSYTLVGFVNDKFKTGNDLYSGNCSTTVRNACTEFKNSKKELIKGSRSIINYRSNQPLDIHNKCIRIEFENNCFYTYLKLLNRPAFKKYNFANTEIKFKILVRDNSTKTILERCISNEYEIAASKLLYDQKKKCWFLNLVYAFEIKSNNSLDPNKILGVDLGIHYPICASVYGSLDRFTIDGGEIDEFRRRVESRKISMLKQGKNCGDGRIGHGIKARNKPVYNIEDKIARFRDTANHKYSRALIEYAVKHTCGTIQMEDLTGITDIANRFLKNWSYYDLQTKIEYKAKEAGINIVYIDPKNTSRRCSKCGYIDKENRETQSRFICLKCGFKENADYNASQNIGIKDIDKLIKEDVH

SEQ ID NO: 44 - protein, 430 aa, synthetic construct
LISEQIDKDGNRVDYKEINSILWNLQKQTRDIKNKTVQLCWEWMNFSSDYYKKNELYPNEKEILNLTLRGYAYDHFKQGYDLYSSNISVLTEAVCGAFKNAKKEMLNGEKSVLSYKAEQPLDIHKKCIKLEYDKNFYVKLKMLNKAGKKKYGIEDDLNFKIQVEDKSTRTILERCIDGEYVVSGSKLIYDKKKKLWKLNLCYSFKANEIESLDKNKILGIDLGIACPLMASVNGEFDRFSIKGGEIETFRKRIEARKRSVLHQTKYCGDGRIGHGRNKRTEPAYKINDKIARFRDTANHKYSRALIDYAIRKNCGMIQMENLTGISDNKEHFLKEWSYYDLQTKIENKAKEKGIKIVYINPEYTSQRCSKCGYIDANNRELRAVFKCQNCGFEADADYNASQNIGIKNIEDIIENTLKISSANEKQTKNT

SEQ ID NO: 45 - protein, 429 aa, synthetic construct
LVKVVKIYLISEQVDEQGKDVDYNTICGVLWDLQWETREIKNKTVQLCWEWSGFSSDYYKKYGEYPKEKNLLDYTMGGFVYDKLKSKYHLYTANLSTTSQNTCGIFRTYKVDFVKGNRSVLSFKADQPLDVHKKSISIDRIDDNYFVKLKLLNKSGIQKYGIRDDFHFRMLVKDNSTKTILERCVGGDYKAAASKIIYDKKKKMWCLNLSYEFDVNTAKDLNKNRILGIDIGIVYPVVASVNGELDRFVIQGGEIETFRRRVENRKKSLLKQTKYCGDGRIGHGRNKRTEPVDIISDQIARFRNTANHKYSRAVIDYAVRKQCGTIQMENLKGITDKSDRFLKNWSYYDLQQKIEYKAKEKGINVVFINPKYTSQRCSRCGYIDSANRPKLPNQSKFLCIKCGFTENADYNASQNIALYNIEKLIDAEA

SEQ ID NO: 46 - protein, 707 aa, synthetic construct
MADTPTLFTQFLRHHLPGQRFRKDILKQAGRILANKGEDATIAFLRGKSEESPPDFQPPVKCPIIACSRPLTEWPIYQASVAIQGYVYGQSLAEFEASDPGCSKDGLLGWFDKTGVCTDYFSVQGLNLIFQNARKRYIGVQTKVTNRNEKRHKKLKRINAKRIAEGLPELTSDEPESALDETGHLIDPPGLNTNIYCYQQVSPKPLALSEVNQLPTAYAGYSTSGDDPIQPMVTKDRLSISKGQPGYIPEHQRALLSQKKHRRMRGYGLKARALLVIVRIQDDWAVIDLRSLLRNAYWRRIVQTKEPSTITKLLKLVTGDPVLDATRMVATFTYKPGIVQVRSAKCLKNKQGSKLFSERYLNETVSVTSIDLGSNNLVAVATYRLVNGNTPELLQRFTLPSHLVKDFERYKQAHDTLEDSIQKTAVASLPQGQQTEIRMWSMYGFREAQERVCQELGLADGSIPWNVMTATSTILTDLFLARGGDPKKCMFTSEPKKKKNSKQVLYKIRDRAWAKMYRTLLSKETREAWNKALWGLKRGSPDYARLSKRKEELARRCVNYTISTAEKRAQCGRTIVALEDLNIGFFHGRGKQEPGWVGLFTRKKENRWLMQALHKAFLELAHHRGYHVIEVNPAYTSQTCPVCRHCDPDNRDQHNREAFHCIGCGFRGNADLDVATHNIAMVAITGESLKRARGSVASKTPQPLAAE

SEQ ID NO: 47 - protein, 757 aa, synthetic construct
MPKPAVESEFSKVLKKHFPGERFRSSYMKRGGKILAAQGEEAVVAYLQGKSEEEPPNFQPPAKCHVVTKSRDFAEWPIMKASEAIQRYIYALSTTERAACKPGKSSESHAAWFAATGVSNHGYSHVQGLNLIFDHTLGRYDGVLKKVQLRNEKARARLESINASRADEGLPEIKAEEEEVATNETGHLLQPPGINPSFYVYQTISPQAYRPRDEIVLPPEYAGYVRDPNAPIPLGVVRNRCDIQKGCPGYIPEWQREAGTAISPKTGKAVTVPGLSPKKNKRMRRYWRSEKEKAQDALLVTVRIGTDWVVIDVRGLLRNARWRTIAPKDISLNALLDLFTGDPVIDVRRNIVTFTYTLDACGTYARKWTLKGKQTKATLDKLTATQTVALVAIDLGQTNPISAGISRVTQENGALQCEPLDRFTLPDDLLKDISAYRIAWDRNEEELRARSVEALPEAQQAEVRALDGVSKETARTQLCADFGLDPKRLPWDKMSSNTTFISEALLSNSVSRDQVFFTPAPKKGAKKKAPVEVMRKDRTWARAYKPRLSVEAQKLKNEALWALKRTSPEYLKLSRRKEELCRRSINYVIEKTRRRTQCQIVIPVIEDLNVRFFHGSGKRLPGWDNFFTAKKENRWFIQGLHKAFSDLRTHRSFYVFEVRPERTSITCPKCGHCEVGNRDGEAFQCLSCGKTCNADLDVATHNLTQVALTGKTMPKREEPRDAQGTAPARKTKKASKSKAPPAEREDQTPAQEPSQTS

SEQ ID NO: 48 - protein, 765 aa, synthetic construct
MYILEMADLKSEPSLLAKLLRDRFPGKYWLPKYWKLAEKKRLTGGEEAACEYMADKQLDSPPPNFRPPARCVILAKSRPFEDWPVHRVASKAQSFVIGLSEQGFAALRAAPPSTADARRDWLRSHGASEDDLMALEAQLLETIMGNAISLHGGVLKKIDNANVKAAKRLSGRNEARLNKGLQELPPEQEGSAYGADGLLVNPPGLNLNIYCRKSCCPKPVKNTARFVGHYPGYLRDSDSILISGTMDRLTIIEGMPGHIPAWQREQGLVKPGGRRRRLSGSESNMRQKVDPSTGPRRSTRSGTVNRSNQRTGRNGDPLLVEIRMKEDWVLLDARGLLRNLRWRESKRGLSCDHEDLSLSGLLALFSGDPVIDPVRNEVVFLYGEGIIPVRSTKPVGTRQSKKLLERQASMGPLTLISCDLGQTNLIAGRASAISLTHGSLGVRSSVRIELDPEIIKSFERLRKDADRLETEILTAAKETLSDEQRGEVNSHEKDSPQTAKASLCRELGLHPPSLPWGQMGPSTTFIADMLISHGRDDDAFLSHGEFPTLEKRKKFDKRFCLESRPLLSSETRKALNESLWEVKRTSSEYARLSQRKKEMARRAVNFVVEISRRKTGLSNVIVNIEDLNVRIFHGGGKQAPGWDGFFRPKSENRWFIQAIHKAFSDLAAHHGIPVIESDPQRTSMTCPECGHCDSKNRNGVRFLCKGCGASMDADFDAACRNLERVALTGKPMPKPSTSCERLLSATTGKVCSDHSLSHDAIEKAS

SEQ ID NO: 49 - protein, 766 aa, synthetic construct
MEKEITELTKIRREFPNKKFSSTDMKKAGKLLKAEGPDAVRDFLNSCQEIIGDFKPPVKTNIVSISRPFEEWPVSMVGRAIQEYYFSLTKEELESVHPGTSSEDHKSFFNITGLSNYNYTSVQGLNLIFKNAKAIYDGTLVKANNKNKKLEKKFNEINHKRSLEGLPIITPDFEEPFDENGHLNNPPGINRNIYGYQGCAAKVFVPSKHKMVSLPKEYEGYNRDPNLSLAGFRNRLEIPEGEPGHVPWFQRMDIPEGQIGHVNKIQRFNFVHGKNSGKVKFSDKTGRVKRYHHSKYKDATKPYKFLEESKKVSALDSILAIITIGDDWVVFDIRGLYRNVFYRELAQKGLTAVQLLDLFTGDPVIDPKKGVVTFSYKEGVVPVFSQKIVPRFKSRDTLEKLTSQGPVALLSVDLGQNEPVAARVCSLKNINDKITLDNSCRISFLDDYKKQIKDYRDSLDELEIKIRLEAINSLETNQQVEIRDLDVFSADRAKANTVDMFDIDPNLISWDSMSDARVSTQISDLYLKNGGDESRVYFEINNKRIKRSDYNISQLVRPKLSDSTRKNLNDSIWKLKRTSEEYLKLSKRKLELSRAVVNYTIRQSKLLSGINDIVIILEDLDVKKKFNGRGIRDIGWDNFFSSRKENRWFIPAFHKAFSELSSNRGLCVIEVNPAWTSATCPDCGFCSKENRDGINFTCRKCGVSYHADIDVATLNIARVAVLGKPMSGPADRERLGDTKKPRVARSRKTMKRKDISNSTVEAMVTA

SEQ ID NO: 50 - protein, 812 aa, synthetic construct
MDMLDTETNYATETPAQQQDYSPKPPKKAQRAPKGFSKKARPEKKPPKPITLFTQKHFSGVRFLKRVIRDASKILKLSESRTITFLEQAIERDGSAPPDVTPPVHNTIMAVTRPFEEWPEVILSKALQKHCYALTKKIKIKTWPKKGPGKKCLAAWSARTKIPLIPGQVQATNGLFDRIGSIYDGVEKKVTNRNANKKLEYDEAIKEGRNPAVPEYETAYNIDGTLINKPGYNPNLYITQSRTPRLITEADRPLVEKILWQMVEKKTQSRNQARRARLEKAAHLQGLPVPKFVPEKVDRSQKIEIRIIDPLDKIEPYMPQDRMAIKASQDGHVPYWQRPFLSKRRNRRVRAGWGKQVSSIQAWLTGALLVIVRLGNEAFLADIRGALRNAQWRKLLKPDATYQSLFNLFTGDPVVNTRTNHLTMAYREGVVNIVKSRSFKGRQTREHLLTLLGQGKTVAGVSFDLGQKHAAGLLAAHFGLGEDGNPVFTPIQACFLPQRYLDSLTNYRNRYDALTLDMRRQSLLALTPAQQQEFADAQRDPGGQAKRACCLKLNLNPDEIRWDLVSGISTMISDLYIERGGDPRDVHQQVETKPKGKRKSEIRILKIRDGKWAYDFRPKIADETRKAQREQLWKLQKASSEFERLSRYKINIARAIANWALQWGRELSGCDIVIPVLEDLNVGSKFFDGKGKWLLGWDNRFTPKKENRWFIKVLHKAVAELAPHRGVPVYEVMPHRTSMTCPACHYCHPTNREGDRFECQSCHVVKNTDRDVAPYNILRVAVEGKTLDRWQAEKKPQAEPDRPMILIDNQES

SEQ ID NO: 51 - protein, 812 aa, synthetic construct
MDMLDTETNYATETPAQQQDYSPKPPKKAQRAPKGFSKKARPEKKPPKPITLFTQKHFSGVRFLKRVIRDASKILKLSESRTITFLEQAIERDGSAPPDVTPPVHNTIMAVTRPFEEWPEVILSKALQKHCYALTKKIKIKTWPKKGPGKKCLAAWSARTKIPLIPGQVQATNGLFDRIGSIYDGVEKKVTNRNANKKLEYDEAIKEGRNPAVPEYETAYNIDGTLINKPGYNPNLYITQSRTPRLITEADRPLVEKILWQMVEKKTQSRNQARRARLEKAAHLQGLPVPKFVPEKVDRSQKIEIRIIDPLDKIEPYMPQDRMAIKASQDGHVPYWQRPFLSKRRNRRVRAGWGKQVSSIQAWLTGALLVIVRLGNEAFLADIRGALRNAQWRKLLKPDATYQSLFNLFTGDPVVNTRTNHLTMAYREGVVDIVKSRSFKGRQTREHLLTLLGQGKTVAGVSFDLGQKHAAGLLAAHFGLGEDGNPVFTPIQACFLPQRYLDSLTNYRNRYDALTLDMRRQSLLALTPAQQQEFADAQRDPGGQAKRACCLKLNLNPDEIRWDLVSGISTMISDLYIERGGDPRDVHQQVETKPKGKRKSEIRILKIRDGKWAYDFRPKIADETRKAQREQLWKLQKASSEFERLSRYKINIARAIANWALQWGRELSGCDIVIPVLEDLNVGSKFFDGKGKWLLGWDNRFTPKKENRWFIKVLHKAVAELAPHKGVPVYEVMPHRTSMTCPACHYCHPTNREGDRFECQSCHVVKNTDRDVAPYNILRVAVEGKTLDRWQAEKKPQAEPDRPMILIDNQES

SEQ ID NO: 52 - protein, 793 aa, synthetic construct
MSSLPTPLELLKQKHADLFKGLQFSSKDNKMAGKVLKKDGEEAALAFLSERGVSRGELPNFRPPAKTLVVAQSRPFEEFPIYRVSEAIQLYVYSLSVKELETVPSGSSTKKEHQRFFQDSSVPDFGYTSVQGLNKIFGLARGIYLGVITRGENQLQKAKSKHEALNKKRRASGEAETEFDPTPYEYMTPERKLAKPPGVNHSIMCYVDISVDEFDFRNPDGIVLPSEYAGYCREINTAIEKGTVDRLGHLKGGPGYIPGHQRKESTTEGPKINFRKGRIRRSYTALYAKRDSRRVRQGKLALPSYRHHMMRLNSNAESAILAVIFFGKDWVVFDLRGLLRNVRWRNLFVDGSTPSTLLGMFGDPVIDPKRGVVAFCYKEQIVPVVSKSITKMVKAPELLNKLYLKSEDPLVLVAIDLGQTNPVGVGVYRVMNASLDYEVVTRFALESELLREIESYRQRTNAFEAQIRAETFDAMTSEEQEEITRVRAFSASKAKENVCHRFGMPVDAVDWATMGSNTIHIAKWVMRHGDPSLVEVLEYRKDNEIKLDKNGVPKKVKLTDKRIANLTSIRLRFSQETSKHYNDTMWELRRKHPVYQKLSKSKADFSRRVVNSIIRRVNHLVPRARIVFIIEDLKNLGKVFHGSGKRELGWDSYFEPKSENRWFIQVLHKAFSETGKHKGYYIIECWPNWTSCTCPKCSCCDSENRHGEVFRCLACGYTCNTDFGTAPDNLVKIATTGKGLPGPKKRCKGSSKGKNPKIARSSETGVSVTESGAPKVKKSSPTQTSQSSSQSAP

SEQ ID NO: 53 - protein, 441 aa, synthetic construct
MNKIEKEKTPLAKLMNENFAGLRFPFAIIKQAGKKLLKEGELKTIEYMTGKGSIEPLPNFKPPVKCLIVAKRRDLKYFPICKASCEIQSYVYSLNYKDFMDYFSTPMTSQKQHEEFFKKSGLNIEYQNVAGLNLIFNNVKNTYNGVILKVKNRNEKLKKKAIKNNYEFEEIKTFNDDGCLINKPGINNVIYCFQSISPKILKNITHLPKEYNDYDCSVDRNIIQKYVSRLDIPESQPGHVPEWQRKLPEFNNTNNPRRRRKWYSNGRNISKGYSVDQVNQAKIEDSLLAQIKIGEDWIILDIRGLLRDLNRRELISYKNKLTIKDVLGFFSDYPIIDIKKNLVTFCYKEGVIQVVSQKSIGNKKSKQLLEKLIENKPIALVSIDLGQTNPVSVKISKLNKINNKISIESFTYRFLNEEILKEIEKYRKDYDKLELKLINEA

SEQ ID NO: 54 - protein, 812 aa, synthetic construct
MDMLDTETNYATETPSQQQDYSPKPPKKDRRAPKGFSKKARPEKKPPKPITLFTQKHFSGVRFLKRVIRDASKILKLSESRTITFLEQAIERDGSAPPDVTPPVHNTIMAVTRPFEEWPEVILSKALQKHCYALTKKIKIKTWPKKGPGKKCLAAWSARTKIPLIPGQVQATNGLFDRIGSIYDGVEKKVTNRNANKKLEYDEAIKEGRNPAVPEYETAYNIDGTLINKPGYNPNLYITQSRTPRLITEADRPLVEKILWQMVEKKTQSRNQARRARLEKAAHLQGLPVPKFVPEKVDRSQKIEIRIIDPLDKIEPYMPQDRMAIKASQDGHVPYWQRPFLSKRRNRRVRAGWGKQVSSIQAWLTGALLVIVRLGNEAFLADIRGALRNAQWRKLLKPDATYQSLFNLFTGDPVVNTRTNHLTMAYREGVVDIVKSRSFKGRQTREHLLTLLGQGKTVAGVSFDLGQKHAAGLLAAHFGLGEDGNPVFTPIQACFLPQRYLDSLTNYRNRYDALTLDMRRQSLLALTPAQQQEFADAQRDPGGQAKRACCLKLNLNPDEIRWDLVSGISTMISDLYIERGGDPRDVHQQVETKPKGKRKSEIRILKIRDGKWAYDFRPKIADETRKAQREQLWKLQKASSEFERLSRYKINIARAIANWALQWGRELSGCDIVIPVLEDLNVGSKFFDGKGKWLLGWDNRFTPKKENRWFIKVLHKAVAELAPHRGVPVYEVMPHRTSMTCPACHYCHPTNREGDRFECQSCHVVKNTDRDVAPYNILRVAVEGKTLDRWQAEKKPQAEPDRPMILIDNQES

SEQ ID NO: 55 - protein, 812 aa, synthetic construct
MDMLDTETNYATETPSQQQDYSPKPPKKDRRAPKGFSKKARPEKKPPKPITLFTQKHFSGVRFLKRVIRDASKILKLSESRTITFLEQAIERDGSAPPDVTPPVHNTIMAVTRPFEEWPEVILSKALQKHCYALTKKIKIKTWPKKGPGKKCLAAWSARTKIPLIPGQVQATNGLFDRIGSIYDGVEKKVTNRNANKKLEYDEAIKEGRNPAVPEYETAYNIDGTLINKPGYNPNLYITQSRTPRLITEADRPLVEKILWQMVEKKTQSRNQARRARLEKAAHLQGLPVPKFVPEKVDRSQKIEIRIIDPLDKIEPYMPQDRMAIKASQDGHVPYWQRPFLSKRRNRRVRAGWGKQVSSIQAWLTGALLVIVRLGNEAFLADIRGALRNAQWRKLLKPDATYQSLFNLFTGDPVVNTRTNHLTMAYREGVVNIVKSRSFKGRQTREHLLTLLGQGKTVAGVSFDLGQKHAAGLLAAHFGLGEDGNPVFTPIQACFLPQRYLDSLTNYRNRYDALTLDMRRQSLLALTPAQQQEFADAQRDPGGQAKRACCLKLNLNPDEIRWDLVSGISTMISDLYIERGGDPRDVHQQVETKPKGKRKSEIRILKIRDGKWAYDFRPKIADETRKAQREQLWKLQKASSEFERLSRYKINIARAIANWALQWGRELSGCDIVIPVLEDLNVGSKFFDGKGKWLLGWDNRFTPKKENRWFIKVLHKAVAELAPHRGVPVYEVMPHRTSMTCPACHYCHPTNREGDRFECQSCHVVKNTDRDVAPYNILRVAVEGKTLDRWQAEKKPQAEPDRPMILIDNQES

SEQ ID NO: 56 - protein, 761 aa, synthetic construct
MSNKTTPPSPLSLLLRAHFPGLKFESQDYKIAGKKLRDGGPEAVISYLTGKGQAKLKDVKPPAKAFVIAQSRPFIEWDLVRVSRQIQEKIFGIPATKGRPKQDGLSETAFNEAVASLEVDGKSKLNEETRAAFYEVLGLDAPSLHAQAQNALIKSAISIREGVLKKVENRNEKNLSKTKRRKEAGEEATFVEEKAHDERGYLIHPPGVNQTIPGYQAVVIKSCPSDFIGLPSGCLAKESAEALTDYLPHDRMTIPKGQPGYVPEWQHPLLNRRKNRRRRDWYSASLNKPKATCSKRSGTPNRKNSRTDQIQSGRFKGAIPVLMRFQDEWVIIDIRGLLRNARYRKLLKEKSTIPDLLSLFTGDPSIDMRQGVCTFIYKAGQACSAKMVKTKNAPEILSELTKSGPVVLVSIDLGQTNPIAAKVSRVTQLSDGQLSHETLLRELLSNDSSDGKEIARYRVASDRLRDKLANLAVERLSPEHKSEILRAKNDTPALCKARVCAALGLNPEMIAWDKMTPYTEFLATAYLEKGGDRKVATLKPKNRPEMLRRDIKFKGTEGVRIEVSPEAAEAYREAQWDLQRTSPEYLRLSTWKQELTKRILNQLRHKAAKSSQCEVVVMAFEDLNIKMMHGNGKWADGGWDAFFIKKRENRWFMQAFHKSLTELGAHKGVPTIEVTPHRTSITCTKCGHCDKANRDGERFACQKCGFVAHADLEIATDNIERVALTGKPMPKPESERSGDAKKSVGARKAAFKPEEDAEAAE

SEQ ID NO: 57 - protein, 717 aa, synthetic construct
MIKPTVSQFLTPGFKLIRNHSRTAGLKLKNEGEEACKKFVRENEIPKDECPNFQGGPAIANIIAKSREFTEWEIYQSSLAIQEVIFTLPKDKLPEPILKEEWRAQWLSEHGLDTVPYKEAAGLNLIIKNAVNTYKGVQVKVDNKNKNNLAKINRKNEIAKLNGEQEISFEEIKAFDDKGYLLQKPSPNKSIYCYQSVSPKPFITSKYHNVNLPEEYIGYYRKSNEPIVSPYQFDRLRIPIGEPGYVPKWQYTFLSKKENKRRKLSKRIKNVSPILGIICIKKDWCVFDMRGLLRTNHWKKYHKPTDSINDLFDYFTGDPVIDTKANVVRFRYKMENGIVNYKPVREKKGKELLENICDQNGSCKLATVDVGQNNPVAIGLFELKKVNGELTKTLISRHPTPIDFCNKITAYRERYDKLESSIKLDAIKQLTSEQKIEVDNYNNNFTPQNTKQIVCSKLNINPNDLPWDKMISGTHFISEKAQVSNKSEIYFTSTDKGKTKDVMKSDYKWFQDYKPKLSKEVRDALSDIEWRLRRESLEFNKLSKSREQDARQLANWISSMCDVIGIENLVKKNNFFGGSGKREPGWDNFYKPKKENRWWINAIHKALTELSQNKGKRVILLPAMRTSITCPKCKYCDSKNRNGEKFNCLKCGIELNADIDVATENLATVAITAQSMPKPTCERSGDAKKPVRARKAKAPEFHDKLAPSYTVVLREAV

SEQ ID NO: 58 - protein, 781 aa, synthetic construct
MRQPAEKTAFQVFRQEVIGTQKLSGGDAKTAGRLYKQGKMEAAREWLLKGARDDVPPNFQPPAKCLVVAVSHPFEEWDISKTNHDVQAYIYAQPLQAEGHLNGLSEKWEDTSADQHKLWFEKTGVPDRGLPVQAINKIAKAAVNRAFGVVRKVENRNEKRRSRDNRIAEHNRENGLTEVVREAPEVATNADGFLLHPPGIDPSILSYASVSPVPYNSSKHSFVRLPEEYQAYNVEPDAPIPQFVVEDRFAIPPGQPGYVPEWQRLKCSTNKHRRMRQWSNQDYKPKAGRRAKPLEFQAHLTRERAKGALLVVMRIKEDWVVFDVRGLLRNVEWRKVLSEEAREKLTLKGLLDLFTGDPVIDTKRGIVTFLYKAEITKILSKRTVKTKNARDLLLRLTEPGEDGLRREVGLVAVDLGQTHPIAAAIYRIGRTSAGALESTVLHRQGLREDQKEKLKEYRKRHTALDSRLRKEAFETLSVEQQKEIVTVSGSGAQITKDKVCNYLGVDPSTLPWEKMGSYTHFISDDFLRRGGDPNIVHFDRQPKKGKVSKKSQRIKRSDSQWVGRMRPRLSQETAKARMEADWAAQNENEEYKRLARSKQELARWCVNTLLQNTRCITQCDEIVVVIEDLNVKSLHGKGAREPGWDNFFTPKTENRWFIQILHKTFSELPKHRGEHVIEGCPLRTSITCPACSYCDKNSRNGEKFVCVACGATFHADFEVATYNLVRLATTGMPMPKSLERQGGGEKAGGARKARKKAKQVEKIVVQANANVTMNGASLHSP

SEQ ID NO: 59 - protein, 793 aa, synthetic construct; identical to SEQ ID NO: 52

SEQ ID NO: 60 - protein, 717 aa, synthetic construct; identical to SEQ ID NO: 57

SEQ ID NO: 61 - protein, 761 aa, synthetic construct; identical to SEQ ID NO: 56

SEQ ID NO: 62 - protein, 765 aa, synthetic construct
MYSLEMADLKSEPSLLAKLLRDRFPGKYWLPKYWKLAEKKRLTGGEEAACEYMADKQLDSPPPNFRPPARCVILAKSRPFEDWPVHRVASKAQSFVIGLSEQGFAALRAAPPSTADARRDWLRSHGASEDDLMALEAQLLETIMGNAISLHGGVLKKIDNANVKAAKRLSGRNEARLNKGLQELPPEQEGSAYGADGLLVNPPGLNLNIYCRKSCCPKPVKNTARFVGHYPGYLRDSDSILISGTMDRLTIIEGMPGHIPAWQREQGLVKPGGRRRRLSGSESNMRQKVDPSTGPRRSTRSGTVNRSNQRTGRNGDPLLVEIRMKEDWVLLDARGLLRNLRWRESKRGLSCDHEDLSLSGLLALFSGDPVIDPVRNEVVFLYGEGIIPVRSTKPVGTRQSKKLLERQASMGPLTLISCDLGQTNLIAGRASAISLTHGSLGVRSSVRIELDPEIIKSFERLRKDADRLETEILTAAKETLSDEQRGEVNSHEKDSPQTAKASLCRELGLHPPSLPWGQMGPSTTFIADMLISHGRDDDAFLSHGEFPTLEKRKKFDKRFCLESRPLLSSETRKALNESLWEVKRTSSEYARLSQRKKEMARRAVNFVVEISRRKTGLSNVIVNIEDLNVRIFHGGGKQAPGWDGFFRPKSENRWFIQAIHKAFSDLAAHHGIPVIESDPQRTSMTCPECGHCDSKNRNGVRFLCKGCGASMDADFDAACRNLERVALTGKPMPKPSTSCERLLSATTGKVCSDHSLSHDAIEKAS

SEQ ID NO: 63 - protein, 766 aa, synthetic construct
MEKEITELTKIRREFPNKKFSSTDMKKAGKLLKAEGPDAVRDFLNSCQEIIGDFKPPVKTNIVSISRPFEEWPVSMVGRAIQEYYFSLTKEELESVHPGTSSEDHKSFFNITGLSNYNYTSVQGLNLIFKNAKAIYDGTLVKANNKNKKLEKKFNEINHKRSLEGLPIITPDFEEPFDENGHLNNPPGINRNIYGYQGCAAKVFVPSKHKMVSLPKEYEGYNRDPNLSLAGFRNRLEIPEGEPGHVPWFQRMDIPEGQIGHVNKIQRFNFVHGKNSGKVKFSDKTGRVKRYHHSKYKDATKPYKFLEESKKVSALDSILAIITIGDDWVVFDIRGLYRNVFYRELAQKGLTAVQLLDLFTGDPVIDPKKGVVTFSYKEGVVPVFSQKIVPRFKSRDTLEKLTSQGPVALLSVDLGQNEPVAARVCSLKNINDKITLDNSCRISFLDDYKKQIKDYRDSLDELEIKIRLEAINSLETNQQVEIRDLDVFSADRAKANTVDMFDIDPNLISWDSMSDARVSTQISDLYLKNGGDESRVYFEINNKRIKRSDYNISQLVRPKLSDSTRKNLNDSIWKLKRTSEEYLKLSKRKLELSRAVVNYTIRQSKLLSGINDIVIILEDLDVKKKFNGRGIRDIGWDNFFSSRKENRWFIPAFHKTFSELSSNRGLCVIEVNPAWTSATCPDCGFCSKENRDGINFTCRKCGVSYHADIDVATLNIARVAVLGKPMSGPADRERLGDTKKPRVARSRKTMKRKDISNSTVEAMVTA

SEQ ID NO: 64 - protein, 870 aa, synthetic construct
MLVRTSTLVQDNKNSRSASRAFLKKPKMPKNKHIKEPTELAKLIRELFPGQRFTRAINTQAGKILKHKGRDEVVEFLKNKGIDKEQFMDFRPPTKARIVATSGAIEEFSYLRVSMAIQECCFGKYKFPKEKVNGKLVLETVGLTKEELDDFLPKKYYENKKSRDRFFLKTGICDYGYTYAQGLNEIFRNTRAIYEGVFTKVNNRNEKRREKKDKYNEERRSKGLSEEPYDEDESATDESGHLINPPGVNLNIWTCEGFCKGPYVTKLSGTPGYEVILPKVFDGYNRDPNEIISCGITDRFAIPEGEPGHIPWHQRLEIPEGQPGYVPGHQRFADTGQNNSGKANPNKKGRMRKYYGHGTKYTQPGEYQEVFRKGHREGNKRRYWEEDFRSEAHDCILYVIHIGDDWVVCDLRGPLRDAYRRGLVPKEGITTQELCNLFSGDPVIDPKHGVVTFCYKNGLVRAQKTISAGKKSRELLGALTSQGPIALIGVDLGQTEPVGARAFIVNQARGSLSLPTLKGSFLLTAENSSSWNVFKGEIKAYREAIDDLAIRLKKEAVATLSVEQQTEIESYEAFSAEDAKQLACEKFGVDSSFILWEDMTPYHTGPATYYFAKQFLKKNGGNKSLIEYIPYQKKKSKKTPKAVLRSDYNIACCVRPKLLPETRKALNEAIRIVQKNSDEYQRLSKRKLEFCRRVVNYLVRKAKKLTGLERVIIAIEDLKSLEKFFTGSGKRDNGWSNFFRPKKENRWFIPAFHKAFSELAPNRGFYVIECNPARTSITDPDCGYCDGDNRDGIKFECKKCGAKHHTDLDVAPLNIAIVAVTGRPMPKTVSNKSKRERSGGEKSVGASRKRNHRKSKANQEMLDATSSAAE

SEQ ID NO: 65 - protein, 830 aa, synthetic construct
MPKIKKPTEISLLRKEVFPDLHFAKDRMRAASLVLKNEGREAAIEYLRVNHEDKPPNFMPPAKTPYVALSRPLEQWPIAQASIAIQKYIFGLTKDEFSATKKLLYGDKSTPNTESRKRWFEVTGVPNFGYMSAQGLNAIFSGALARYEGVVQKVENRNKKRFEKLSEKNQLLIEEGQPVKDYVPDTAYHTPETLQKLAENNHVRVEDLGDMIDRLVHPPGIHRSIYGYQQVPPFAYDPDNPKGIILPKAYAGYTRKPHDIIEAMPNRLNIPEGQAGYIPEHQRDKLKKGGRVKRLRTTRVRVDATETVRAKAEALNAEKARLRGKEAILAVFQIEEDWALIDMRGLLRNVYMRKLIAAGELTPTTLLGYFTETLTLDPRRTEATFCYHLRSEGALHAEYVRHGKNTRELLLDLTKDNEKIALVTIDLGQRNPLAAAIFRVGRDASGDLTENSLEPVSRMLLPQAYLDQIKAYRDAYDSFRQNIWDTALASLTPEQQRQILAYEAYTPDDSKENVLRLLLGGNVMPDDLPWEDMTKNTHYISDRYLADGGDPSKVWFVPGPRKRKKNAPPLKKPPKPRELVKRSDHNISHLSEFRPQLLKETRDAFEKAKIDTERGHVGYQKLSTRKDQLCKEILNWLEAEAVRLTRCKTMVLGLEDLNGPFFNQGKGKVRGWVSFFRQKQENRWIVNGFRKNALARAHDKGKYILELWPSWTSQTCPKCKHVHADNRHGDDFVCLQCGARLHADAEVATWNLAVVAIQGHSLPGPVREKSNDRKKSGSARKSKKANESGKVVGAWAAQATPKRATSKKETGTARNPVYNPLETQASCPAP

SEQ ID NO: 66 - protein, 790 aa, synthetic construct
MTPSPQIARLVETPLAAALKAHHPGKKFRSDYLKKAGKILKDQGVEAAMAHLDGKDQAEPPNFKPPAKCRIVARSREFSEWPIVKASVEIQKYIYGLTLEERKACDPGKSSASHKAWFAKTGVNTFGYSSVQGFNLIFGHTLGRYDGVLVKTENLNKKRAEKNERFRAKALAEGRAEPVCPPLVTATNDTGQDVTLEDGRVVRPGQLLQPPGINPNIYAYQQVSPKAYVPGIIELPEEFQGYSRDPNAVILPLVPRDRLSIPKGQPGYVPEPHREGLTGRKDRRMRRYYETERGTKLKRPPLTAKGRADKANEALLVVVRIDSDWVVMDVRGLLRNARWRRLVSKEGITLNGLLDLFTGDPVLNPKDCSVSRDTGDPVNDPRHGVVTFCYKLGVVDVCSKDRPIKGFRTKEVLERLTSSGTVGMVSIDLGQTNPVAAAVSRVTKGLQAETLETFTLPDDLLGKVRAYRAKTDRMEEGFRRNALRKLTAEQQAEITRYNDATEQQAKALVCSTYGIGPEEVPWERMTSNTTYISDHILDHGGDPDTVFFMATKRGQNKPTLHKRKDKAWGQKFRPAISVETRLARQAAEWELRRASLEFQKLSVWKTELCRQAVNYVMERTKKRTQCDVIIPVIEDLPVPLFHGSGKRDPGWANFFVHKRENRWFIDGLHKAFSELGKHRGIYVFEVCPQRTSITCPKCGHCDPDNRDGEKFVCLSCQATLNADLDVATTNLVRVALTGKVMPRSERSGDAQTPGPARKARTGKIKGSKPTSAPQGATQTDAKAHLSQTGV

SEQ ID NO: 67 - protein, 790 aa, synthetic construct
MTPSPQIARLVETPLAAALKAHHPGKKFRSDYLKKAGKILKDQGVEAAMAHLDGKDQAEPPNFKPPAKCRIVARSREFSEWPIVKASVEIQKYIYGLTLEERKACDPGKSSASHKAWFAKTGVNTFGYSSVQGFNLIFGHTLGRYDGVLVKTENLNKKRAEKNERFRAKALAEGRAEPVCPPLVTATNDTGQDVTLEDGRVVRPGQLLQPPGINPNIYAYQQVSPKAYVPGIIELPEEFQGYSRDPNAVILPLVPRDRLSIPKGQPGYVPEPHREGLTGRKDRRMRRYYETERGTKLKRPPLTAKGRADKANEALLVVVRIDSDWVVMDVRGLLRNARWRRLVSKEGITLNGLLDLFTGDPVLNPKDCSVSRDTGDPVNDPRHGVVTFCYKLGVVDVCSKDRPIKGFRTKEVLERLTSSGTVGMVSIDLGQTNPVAAAVSRVTKGLQAETLETFTLPDDLLGKVRAYRAKTDRMEEGFRRNALRKLTAEQQAEITRYNDATEQQAKALVCSTYGIGPEEVPWERMTSNTTYISDHILDHGGDPDTVFFMATKRGQNKPTLHKRKDKAWGQKFRPAISVETRLARQAAEWELRRASLEFQKLSVWKTELCRQAVNYVMERTKKRTQCDVIIPVIEDLPVPLFHGSGKRDPGWANFFVHKRENRWFIDGLHKAFSELGKHRGIYVFEVCPQRTSITCPKCGHCDPDNRDGEKFVCLSCQATLHADLDVATTNLVRVALTGKVMPRSERSGDAQTPGPARKARTGKIKGSKPTSAPQGATQTDAKAHLSQTGV

SEQ ID NO: 68 - protein, 782 aa, synthetic construct
MKTEKPKTALTLLREEVFPGKKYRLDVLKEAGKKLSTKGREATIEFLTGKDEERPQNFQPPAKTSIVAQSRPFDQWPIVQVSLAVQKYIYGLTQSEFEANKKALYGETGKAISTESRRAWFEATGVDNFGFTAAQGINPIFSQAVARYEGVIKKVENRNEKKLKKLTKKNLLRLESGEEIEDFEPEATFNEEGRLLQPPGANPNIYCYQQISPRIYDPSDPKGVILPQIYAGYDRKPEDIISAGVPNRLAIPEGQPGYIPEHQRAGLKTQGRIRCRASVEAKARAAILAVVHLGEDWVVLDLRGLLRNVYWRKLASPGTLTLKGLLDFFTGGPVLDARRGIATFSYTLKSAAAVHAENTYKGKGTREVLLKLTENNSVALVTVDLGQRNPLAAMIARVSRTSQGDLTYPESVEPLTRLFLPDPFLEEVRKYRSSYDALRLSIREAAIASLTPEQQAEIRYIEKFSAGDAKKNVAEVFGIDPTQLPWDAMTPRTTYISDLFLRMGGDRSRVFFEVPPKKAKKAPKKPPKKPAGPRIVKRTDGMIARLREIRPRLSAETNKAFQEARWEGERSNVAFQKLSVRRKQFARTVVNHLVQTAQKMSRCDTVVLGIEDLNVPFFHGRGKYQPGWEGFFRQKKENRWLINDMHKALSERGPHRGGYVLELTPFWTSLRCPKCGHTDSANRDGDDFVCVKCGAKLHSDLEVATANLALVAITGQSIPRPPREQSSGKKSTGTARMKKTSGETQGKGSKACVSEALNKIEQGTARDPVYNPLNSQVSCPAP

SEQ ID NO: 69 - protein, 774 aa, synthetic construct
VYNPDMKKPNNIRRIREEHFEGLCFGKDVLTKAGKIYEKDGEEAAIDFLMGKDEEDPPNFKPPAKTTIVAQSRPFDQWPIYQVSQAVQERVFAYTEEEFNASKEALFSGDISSKSRDFWFKTNNISDQGIGAQGLNTILSHAFSRYSGVIKKVENRNKKRLKKLSKKNQLKIEEGLEILEFKPDSAFNENGLLAQPPGINPNIYGYQAVTPFVFDPDNPGDVILPKQYEGYSRKPDDIIEKGPSRLDIPKGQPGYVPEHQRKNLKKKGRVRLYRRTPPKTKALASILAVLQIGKDWVLFDMRGLLRSVYMREAATPGQISAKDLLDTFTGCPVLNTRTGEFTFCYKLRSEGALHARKIYTKGETRTLLTSLTSENNTIALVTVDLGQRNPAAIMISRLSRKEELSEKDIQPVSRRLLPDRYLNELKRYRDAYDAFRQEVRDEAFTSLCPEHQEQVQQYEALTPEKAKNLVLKHFFGTHDPDLPWDDMTSNTHYIANLYLERGGDPSKVFFTRPLKKDSKSKKPRKPTKRTDASISRLPEIRPKMPEDARKAFEKAKWEIYTGHEKFPKLAKRVNQLCREIANWIEKEAKRLTLCDTVVVGIEDLSLPPKRGKGKFQETWQGFFRQKFENRWVIDTLKKAIQNRAHDKGKYVLGLAPYWTSQRCPACGFIHKSNRNGDHFKCLKCEALFHADSEVATWNLALVAVLGKGITNPDSKKPSGQKKTGTTRKKQIKGKNKGKETVNVPPTTQEVEDIIAFFEKDDETVRNPVYKPTGT

SEQ ID NO: 70 - protein, 769 aa, synthetic construct
MKKPNNIRRIREEHFEGLCFGKDVLTKAGKIYEKDGEEAAIDFLMGKDEEDPPNFKPPAKTTIVAQSRPFDQWPIYQVSQAVQERVFAYTEEEFNASKEALFSGDISSKSRDFWFKTNNISDQGIGAQGLNTILSHAFSRYSGVIKKVENRNKKRLKKLSKKNQLKIEEGLEILEFKPDSAFNENGLLAQPPGINPNIYGYQAVTPFVFDPDNPGDVILPKQYEGYSRKPDDIIEKGPSRLDIPKGQPGYVPEHQRKNLKKKGRVRLYRRTPPKTKALASILAVLQIGKDWVLFDMRGLLRSVYMREAATPGQISAKDLLDTFTGCPVLNTRTGEFTFCYKLRSEGALHARKIYTKGETRTLLTSLTSENNTIALVTVDLGQRNPAAIMISRLSRKEELSEKDIQPVSRRLLPDRYLNELKRYRDAYDAFRQEVRDEAFTSLCPEHQEQVQQYEALTPEKAKNLVLKHFFGTHDPDLPWDDMTSNTHYIANLYLERGGDPSKVFFTRPLKKDSKSKKPRKPTKRTDASISRLPEIRPKMPEDARKAFEKAKWEIYTGHEKFPKLAKRVNQLCREIANWIEKEAKRLTLCDTVVVGIEDLSLPPKRGKGKFQETWQGFFRQKFENRWVIDTLKKAIQNRAHDKGKYVLGLAPYWTSQRCPACGFIHKSNRNGDHFKCLKCEALFHADSEVATWNLALVAVLGKGITNPDSKKPSGQKKTGTTRKKQIKGKNKGKETVNVPPTTQEVEDIIAFFEKDDETVRNPVYKPTGT

SEQ ID NO: 71 - protein, 767 aa, synthetic construct
VIKTHFPAGRFRKDHQKTAGKKLKHEGEEACVEYLRNKVSDYPPNFKPPAKGTIVAQSRPFSEWPIVRASEAIQKYVYGLTVAELDVFSPGTSKPSHAEWFAKTGVENYGYRQVQGLNTIFQNTVNRFKGVLKKVENRNKKSLKRQEGANRRRVEEGLPEVPVTVESATDDEGRLLQPPGVNPSIYGYQGVAPRVCTDLQGFSGMSVDFAGYRRDPDAVLVESLPEGRLSIPKGERGYVPEWQRDPERNKFPLREGSRRQRKWYSNACHKPKPGRTSKYDPEALKKASAKDALLVSISIGEDWAIIDVRGLLRDARRRGFTPEEGLSLNSLLGLFTEYPVFDVQRGLITFTYKLGQVDVHSRKTVPTFRSRALLESLVAKEEIALVSVDLGQTNPASMKVSRVRAQEGALVAEPVHRMFLSDVLLGELSSYRKRMDAFEDAIRAQAFETMTPEQQAEITRVCDVSVEVARRRVCEKYSISPQDVPWGEMTGHSTFIVDAVLRKGGDESLVYFKNKEGETLKFRDLRISRMEGVRPRLTKDTRDALNKAVLDLKRAHPTFAKLAKQKLELARRCVNFIEREAKRYTQCERVVFVIEDLNVGFFHGKGKRDRGWDAFFTAKKENRWVIQALHKAFSDLGLHRGSYVIEVTPQRTSMTCPRCGHCDKGNRNGEKFVCLQCGATLHADLEVATDNIERVALTGKAMPKPPVRERSGDVQKAGTARKARKPLKPKQKTEPSVQEGSSDDGVDKSPGDASRNPVYNPSDTLSI

SEQ ID NO: 72 - protein, 763 aa, synthetic construct
MAKAKTLAALLRELLPGQHLAPHHRWVANKLLMTSGDAAAFVIGKSVSDPVRGSFRKDVITKAGRIFKKDGPDAAAAFLDGKWEDRPPNFQPPAKAAIVAISRSFDEWPIVKVSCAIQQYLYALPVQEFESSVPEARAQAHAAWFQDTGVDDCNFKSTQGLNAIFNHGKRTYEGVLKKAQNRNDKKNLRLERINAKRAEAGQAPLVAGPDESPTDDAGCLLHPPGINANIYCYQQVSPRPYEQSCGIQLPPEYAGYNRLSNVAIPPMPNRLDIPQGQPGYVPEHHRHGIKKFGRVRKRYGVVPGRNRDADGKRTRQVLTEAGAAAKARDSVLAVIRIGDDWTVVDLRGLLRNAQWRKLVPDGGITVQGLLDLFTGDPVIDPRRGVVTFIYKADSVGIHSEKVCRGKQSKNLLERLCAMPEKSSTRLDCARQAVALVSVDLGQRNPVAARFSRVSLAEGQLQAQLVSAQFLDDAMVAMIRSYREEYDRFESLVREQAKAALSPEQLSEIVRHEADSAESVKSCVCAKFGIDPAGLSWDKMTSGTWRIADHVQAAGGDVEWFFFKTCGKGKEIKTVRRSDFNVAKQFRLRLSPETRKDWNDAIWELKRGNPAYVSFSKRKSEFARRVVNDLVHRARRAVRCDEVVFAIEDLNISFFHGKGQRQMGWDAFFEVKQENRWFIQALHKAFVERATHKGGYVLEVAPARTSTTCPECRHCDPESRRGEQFCCIKCRHTCHADLEVATFNIEQVALTGVSLPKRLSSTLL

SEQ ID NO: 73 - protein, 761 aa, synthetic construct
MSKEKTPPSAYAILKAKHFPDLDFEKKHKMMAGRMFKNGASEQEVVQYLQGKGSESLMDVKPPAKSPILAQSRPFDEWEMVRTSRLIQETIFGIPKRGSIPKRDGLSETQFNELVASLEVGGKPMLNKQTRAIFYGLLGIKPPTFHAMAQNILIDLAINIRKGVLKKVDNLNEKNRKKVKRIRDAGEQDVMVPAEVTAHDDRGYLNHPPGVNPTIPGYQGVVIPFPEGFEGLPSGMTPVDWSHVLVDYLPHDRLSIPKGSPGYIPEWQRPLLNRHKGRRHRSWYANSLNKPRKSRTEEAKDRQNAGKRTALIEAERLKGVLPVLMRFKEDWLIIDARGLLRNARYRGVLPEGSTLGNLIDLFSDSPRVDTRRGICTFLYRKGRAYSTKPVKRKESKETLLKLTEKSTIALVSIDLGQTNPLTAKLSKVRQVDGCLVAEPVLRKLIDNASEDGKEIARYRVAHDLLRARILEDAIDLLGIYKDEVVRARSDTPDLCKERVCRFLGLDSQAIDWDRMTPYTDFIAQAFVAKGGDPKVVTIKPNGKPKMFRKDRSIKNMKGIRLDISKEASSAYREAQWAIQRESPDFQRLAVWQSQLTKRIVNQLVAWAKKCTQCDTVVLAFEDLNIGMMHGSGKWANGGWNALFLHKQENRWFMQAFHKALTELSAHKGIPTIEVLPHRTSITCTQCGHCHPGNRDGERFKCLKCEFLANTDLEIATDNIERVALTGLPMPKGERSSAKRKPGGTRKTKKSKHSGNSPLAAE

SEQ ID NO: 74 - protein, 746 aa, synthetic construct
MEKAGPTSPLSVLIHKNFEGCRFQIDHLKIAGRKLAREGEAAAIEYLLDKKCEGLPPNFQPPAKGNVIAQSRPFTEWAPYRASVAIQKYIYSLSVDERKVCDPGSSSDSHEKWFKQTGVQNYGYTHVQGLNLIFKHALARYDGVLKKVDNRNEKNRKKAERVNSFRREEGLPEEVFEEEKATDETGHLLQPPGVNHSIYCYQSVRPKPFNPRKPGGISLPEAYSGYSLKPQDELPIGSLDRLSIPPGQPGYVPEWQRSQLTTQKHRRKRSWYSAQKWKPRTGRTSTFDPDRLNCARAQGAILAVVRIHEDWVVFDVRGLLRNALWRELAGKGLTVRDLLDFFTGDPVVDTKRGVVTFTYKLGKVDVHSLRTVRGKRSKKVLEDLTLSSDVGLVTIDLGQTNVLAADYSKVTRSENGELLAVPLSKSFLPKHLLHEVTAYRTSYDQMEEGFRRKALLTLTEDQQVEVTLVRDFSVESSKTKLLQLGVDVTSLPWEKMSSNTTYISDQLLQQGADPASLFFDGERDGKPCRHKKKDRTWAYLVRPKVSPETRKALNEALWALKNTSPEFESLSKRKIQFSRRCMNYLLNEAKRISGCGQVVFVIEDLNVRVHHGRGKRAIGWDNFFKPKRENRWFMQALHKAASELAIHRGMHIIEACPARSSITCPKCGHCDPENRCSSDREKFLCVKCGAAFHADLEVATFNLRKVALTGTALPKSIDHSRDGLIPKGARNRKLKEPQANDEKACA

SEQ ID NO: 75 - protein, 735 aa, synthetic construct
MKEQSPLSSVLKSNFPGKKFLSADIRVAGRKLAQLGEAAAVEYLSPRQRDSVPNFRPPAFCTVVAKSRPFEEWPIYKASVLLQEQIYGMTGQEFEERCGSIPTSLSGLRQWASSVGLGAAMEGLHVQGMNLMVKNAINRYKGVLVKVENRNKKLVEANEAKNSSREERGLPPLRPPELGSAFGPDGRLVNPPGIDKSIRLYQGVSPVPVVKTTGRPTVHRLDIPAGEKGHVPLWQREAGLVKEGPRRRRMWYSNSNLKRSRKDRSAEASEARKADSVVVRVSVKEDWVDIDVRGLLRNVAWRGIERAGESTEDLLSLFSGDPVVDPSRDSVVFLYKEGVVDVLSKKVVGAGKSRKQLEKMVSEGPVALVSCDLGQTNYVAARVSVLDESLSPVRSFRVDPREFPSADGSQGVVGSLDRIRADSDRLEAKLLSEAEASLPEPVRAEIEFLRSERPSAVAGRLCLKLGIDPRSIPWEKMGSTTSFISEALSAKGSPLALHDGAPIKDSRFAHAARGRLSPESRKALNEALWERKSSSREYGVISRRKSEASRRMANAVLSESRRLTGLAVVAVNLEDLNMVSKFFHGRGKRAPGWAGFFTPKMENRWFIRSIHKAMCDLSKHRGITVIESRPERTSISCPECGHCDPENRSGERFSCKSCGVSLHADFEVATRNLERVALTGKPMPRRENLHSPEGATASRKTRKKPREATASTFLDLRSVLSSAENEGSGPAARAG

SEQ ID NO: 76 - protein, 725 aa, synthetic construct
MLPPSNKIGKSMSLKEFINKRNFKSSIIKQAGKILKKEGEEAVKKYLDDNYVEGYKKRDFPITAKCNIVASNRKIEDFDISKFSSFIQNYVFNLNKDNFEEFSKIKYNRKSFDELYKKIANEIGLEKPNYENIQGEIAVIRNAINIYNGVLKKVENRNKKIQEKNQSKDPPKLLSAFDDNGFLAERPGINETIYGYQSVRLRHLDVEKDKDIIVQLPDIYQKYNKKSTDKISVKKRLNKYNVDEYGKLISKRRKERINKDDAILCVSNFGDDWIIFDARGLLRQTYRYKLKKKGLCIKDLLNLFTGDPIINPTKTDLKEALSLSFKDGIINNRTLKVKNYKKCPELISELIRDKGKVAMISIDLGQTNPISYRLSKFTANNVAYIENGVISEDDIVKMKKWREKSDKLENLIKEEAIASLSDDEQREVRLYENDIADNTKKKILEKFNIREEDLDFSKMSNNTYFIRDCLKNKNIDESEFTFEKNGKKLDPTDACFAREYKNKLSELTRKKINEKIWEIKKNSKEYHKISIYKKETIRYIVNKLIKQSKEKSECDDIIVNIEKLQIGGNFFGGRGKRDPGWNNFFLPKEENRWFINACHKAFSELAPHKGIIVIESDPAYTSQTCPKCENCDKENRNGEKFKCKKCNYEANADIDVATENLEKIAKNGRRLIKNFDQLGERLPGAEMPGGARKRKPSKSLPKNGRGAGVGSEPELINQSPSQVIA

SEQ ID NO: 77 - protein, 718 aa, synthetic construct
VPDKKETPLVALCKKSFPGLRFKKHDSRQAGRILKSKGEGAAVAFLEGKGGTTQPNFKPPVKCNIVAMSRPLEEWPIYKASVVIQKYVYAQSYEEFKATDPGKSEAGLRAWLKATRVDTDGYFNVQGLNLIFQNARATYEGVLKKVENRNSKKVAKIEQRNEHRAERGLPLLTLDEPETALDETGHLRHRPGINCSVFGYQHMKLKPYVPGSIPGVTGYSRDPSTPIAACGVDRLEIPEGQPGYVPPWDRENLSVKKHRRKRASWARSRGGAIDDNMLLAVVRVADDWALLDLRGLLRNTQYRKLLDRSVPVTIESLLNLVTNDPTLSVVKKPGKPVRYTATLIYKQGVVPVVKAKVVKGSYVSKMLDDTTETFSLVGVDLGVNNLIAANALRIRPGKCVERLQAFTLPEQTVEDFFRFRKAYDKHQENLRLAAVRSLTAEQQAEVLALDTFGPEQAKMQVCGHLGLSVDEVPWDKVNSRSSILSDLAKERGVDDTLYMFPFFKGKGKKRKTEIRKRWDVNWAQHFRPQLTSETRKALNEAKWEAERNSSKYHQLSIRKKELSRHCVNYVIRTAEKRAQCGKVIVAVEDLHHSFRRGGKGSRKSGWGGFFAAKQEGRWLMDALFGAFCDLAVHRGYRVIKVDPYNTSRTCPECGHCDKANRDRVNREAFICVCCGYRGNADIDVAAYNIAMVAITGVSLRKAARASVASTPLESLAAE

SEQ ID NO: 78 - protein, 708 aa, synthetic construct
MSKTKELNDYQEALARRLPGVRHQKSVRRAARLVYDRQGEDAMVAFLDGKEVDEPYTLQPPAKCHILAVSRPIEEWPIARVTMAVQEHVYALPVHEVEKSRPETTEGSRSAWFKNSGVSNHGVTHAQTLNAILKNAYNVYNGVIKKVENRNAKKRDSLAAKNKSRERKGLPHFKADPPELATDEQGYLLQPPSPNSSVYLVQQHLRTPQIDLPSGYTGPVVDPRSPIPSLIPIDRLAIPPGQPGYVPLHDREKLTSNKHRRMKLPKSLRAQGALPVCFRVFDDWAVVDGRGLLRHAQYRRLAPKNVSIAELLELYTGDPVIDIKRNLMTFRFAEAVVEVTARKIVEKYHNKYLLKLTEPKGKPVREIGLVSIDLNVQRLIALAIYRVHQTGESQLALSPCLHREILPAKGLGDFDKYKSKFNQLTEEILTAAVQTLTSAQQEEYQRYVEESSHEAKADLCLKYSITPHELAWDKMTSSTQYISRWLRDHGWNASDFTQITKGRKKVERLWSDSRWAQELKPKLSNETRRKLEDAKHDLQRANPEWQRLAKRKQEYSRHLANTVLSMAREYTACETVVIAIENLPMKGGFVDGNGSRESGWDNFFTHKKENRWMIKDIHKALSDLAPNRGVHVLEVNPQYTSQTCPECGHRDKANRDPIQRERFCCTHCGAQRHADLEVATHNIAMVATTGKSLTGKSLAPQRLQEAAE

SEQ ID NO: 79 - protein, 491 aa, synthetic construct
VLLSDRIQYTDPSAPIPAMTVVDRRKIKKGEPGYVPPFMRKNLSTNKHRRMRLSRGQKEACALPVGLRLPDGKDGWDFIIFDGRALLRACRRLRLEVTSMDDVLDKFTGDPRIQLSPAGETIVTCMLKPQHTGVIQQKLITGKMKDRLVQLTAEAPIAMLTVDLGEHNLVACGAYTVGQRRGKLQSERLEAFLLPEKVLADFEGYRRDSDEHSETLRHEALKALSKRQQREVLDMLRTGADQARESLCYKYGLDLQALPWDKMSSNSTFIAQHLMSLGFGESATHVRYRPKRKASERTILKYDSRFAAEEKIKLTDETRRAWNEAIWECQRASQEFRCLSVRKLQLARAAVNWTLTQAKQRSRCPRVVVVVEDLNVRFMHGGGKRQEGWAGFFKARSEKRWFIQALHKAYTELPTNRGIHVMEVNPARTSITCTKCGYCDPENRYGEDFHCRNPKCKVRGGHVANADLDIATENLARVALSGPMPKAPKLK

SEQ ID NO: 80 - protein, 848 aa, synthetic construct
MTPSFGYQMIIVTPIHHASGAWATLRLLFLNPKTSGVMLGMTKTKSAFALMREEVFPGLLFKSADLKMAGRKFAKEGREAAIEYLRGKDEERPANFKPPAKGDIIAQSRPFDQWPIVQVSQAIQKYIFGLTKAEFDATKTLLYGEGNHPTTESRRRWFEATGVPDFGFTSAQGLNAIFSSALARYEGVIQKVENRNEKRLKKLSEKNQRLVEEGHAVEAYVPETAFHTLESLKALSEKSLVPLDDLMDKIDRLAQPPGINPCLYGYQQVAPYIYDPENPRGVVLPDLYLGYCRKPDDPITACPNRLDIPKGQPGYIPEHQRGQLKKHGRVRRFRYTNPQAKARAKAQTAILAVLRIDEDWVVMDLRGLLRNVYFREVAAPGELTARTLLDTFTGCPVLNLRSNVVTFCYDIESKGALHAEYVRKGWATRNKLLDLTKDGQSVALLSVDLGQRHPVAVMISRLKRDDKGDLSEKSIQVVSRTFADQYVDKLKRYRVQYDALRKEIYDAALVSLPPEQQAEIRAYEAFAPGDAKANVLSVMFQGEVSPDELPWDKMNTNTHYISDLYLRRGGDPSRVFFVPQPSTPKKNAKKPPAPRKPVKRTDENVSHMPEFRPHLSNETREAFQKAKWTMERGNVRYAQLSRFLNQIVREANNWLVSEAKKLTQCQTVVWAIEDLHVPFFHGKGKYHETWDGFFRQKKEDRWFVNVFHKAISERAPNKGEYVMEVAPYRTSQRCPVCGFVDADNRHGDHFKCLRCGVELHADLEVATWNIALVAVQGHGIAGPPREQSCGGETAGTARKGKNIKKNKGLADAVTVEAQDSEGGSKKDAGTARNPVYIPSESQVNCPAP

SEQ ID NO: 81 - protein, 781 aa, synthetic construct
MKPKTPKPPKTPVAALIDKHFPGKRFRASYLKSVGKKLKNQGEDVAVRFLTGKDEERPPNFQPPAKSNIVAQSRPIEEWPIHKVSVAVQEYVYGLTVAEKEACSDAGESSSSHAAWFAKTGVENFGYTSVQGLNKIFPPTFNRFDGVIKKVENRNEKKRQKATRINEAKRNKGQSEDPPEAEVKATDDAGYLLQPPGINHSVYGYQSITLCPYTAEKFPTIKLPEEYAGYHSNPDAPIPAGVPDRLAIPEGQPGHVPEEHRAGLSTKKHRRVRQWYAMANWKPKPKRTSKPDYDRLAKARAQGALLIVIRIDEDWVVVDARGLLRNVRWRSLGKREITPNELLDLFTGDPVLDLKRGVVTFTYAEGVVNVCSRSTTKGKQTKVLLDAMTAPRDGKKRQIGMVAVDLGQTNPIAAEYSRVGKNAAGTLEATPLSRSTLPDELLREIALYRKAHDRLEAQLREEAVLKLTAEQQAENARYVETSEEGAKLALANLGVDTSTLPWDAMTGWSTCISDHLINHGGDTSAVFFQTIRKGTKKLETIKRKDSSWADIVRPRLTKETREALNDFLWELKRSHEGYEKLSKRLEELARRAVNHVVQEVKWLTQCQDIVIVIEDLNVRNFHGGGKRGGGWSNFFTVKKENRWFMQALHKAFSDLAAHRGIPVLEVYPARTSITCLGCGHCDPENRDGEAFVCQQCGATFHADLEVATRNIARVALTGEAMPKAPAREQPGGAKKRGTSRRRKLTEVAVKSAEPTIHQAKNQQLNGTSRDPVYKGSELPAL

SEQ ID NO: 82 - protein, 767 aa, synthetic construct
MSEITDLLKANFKGKTFKSADMRMAGRILKKSGAQAVIKYLSDKGAVDPPDFRPPAKCNIIAQSRPFDEWPICKASMAIQQHIYGLTKNEFDESSPGTSSASHEQWFAKTGVDTHGFTHVQGLNLIFQHAKKRYEGVIKKVENYNEKERKKFEGINERRSKEGMPLLEPRLRTAFGDDGKFAEKPGVNPSIYLYQQTSPRPYDKTKHPYVHAPFELKEITTIPTQDDRLKIPFGAPGHVPEKHRSQLSMAKHKRRRAWYALSQNKPRPPKDGSKGRRSVRDLADLKAASLADAIPLVSRVGFDWVVIDGRGLLRNLRWRKLAHEGMTVEEMLGFFSGDPVIDPRRNVATFIYKAEHATVKSRKPIGGAKRAREELLKATASSDGVIRQVGLISVDLGQTNPVAYEISRMHQANGELVAEHLEYGLLNDEQVNSIQRYRAAWDSMNESFRQKAIESLSMEAQDEIMQASTGAAKRTREAVLTMFGPNATLPWSRMSSNTTCISDALIEVGKEEETNFVTSNGPRKRTDAQWAAYLRPRVNPETRALLNQAVWDLMKRSDEYERLSKRKLEMARQCVNFVVARAEKLTQCNNIGIVLENLVVRNFHGSGRRESGWEGFFEPKRENRWFMQVLHKAFSDLAQHRGVMVFEVHPAYSSQTCPACRYVDPKNRSSEDRERFKCLKCGRSFNADREVATFNIREIARTGVGLPKPDCERSRGVQTTGTARNPGRSLKSNKNPSEPKRVLQSKTRKKITSTETQNEPLATDLKT

SEQ ID NO: 83 - protein, 760 aa, synthetic construct
MTPKTESPLSALCKKHFPGKRFRTNYLKDAGKILKKHGEDAVVAFLSDKQEDEPANFCPPAKVHILAQSRPFEDWPINLASKAIQTYVYGLTADERKTCEPGTSKESHDRWFKETGVDHHGFTSVQGLNLIFKHTLNRYDGVIKKVETRNEKRRSSVVRINEKKAAEGLPLIAAEAEETAFGEDGRLLQPPGVNHSIYCFQQVSPQPYSSKKHPQVVLPHAVQGVDPDAPIPVGRPNRLDIPKGQPGYVPEWQRPHLSMKCKRVRMWYARANWRRKPGRRSVLNEARLKEASAKGALPIVLVIGDDWLVMDARGLLRSVFWRRVAKPGLSLSELLNVTPTGLFSGDPVIDPKRGLVTFTSKLGVVAVHSRKPTRGKKSKDLLLKMTKPTDDGMPRHVGMVAIDLGQTNPVAAEYSRVVQSDAGTLKQEPVSRGVLPDDLLKDVARYRRAYDLTEESIRQEAIALLSEGHRAEVTKLDQTTANETKRLLVDRGVSESLPWEKMSSNTTYISDCLVALGKTDDVFFVPKAKKGKKETGIAVKRKDHGWSKLLRPRTSPEARKALNENQWAVKRASPEYERLSRRKLELGRRCVNHIIQETKRWTQCEDIVVVLEDLNVGFFHGSGKRPDGWDNFFVSKRENRWFIQVLHKAFGDLATHRGTHVIEVHPARTSITCIKCGHCDAGNRDGESFVCLASACGDRRHADLEVATRNVARVAITGERMPPSEQARDVQKAGGARKRKPSARNVKSSYPAVEPAPASP

SEQ ID NO: 84 - protein, 752 aa, synthetic construct
MSDNKMKKLSKEEKPLTPLQILIRKYIDKSQYPSGFKTTIIKQAGVRIKSVKSEQDEINLANWIISKYDPTYIKRDFNPSAKCQIIATSRSVADFDIVKMSNKVQEIFFASSHLDKNVFDIGKSKSDHDSWFERNNVDRGIYTYSNVQGMNLIFSNTKNTYLGVAVKAQNKFSSKMKRIQDINNFRITNHQSPLPIPDEIKIYDDAGFLLNPPGVNPNIFGYQSCLLKPLENKEIISKTSFPEYSRLPADMIEVNYKISNRLKFSNDQKGFIQFKDKLNLFKINSQELFSKRRRLSGQPILLVASFGDDWVVLDGRGLLRQVYYRGIAKPGSITISELLGFFTGDPIVDPIRGVVSLGFKPGVLSQETLKTTSARIFAEKLPNLVLNNNVGLMSIDLGQTNPVSYRLSEITSNMSVEHICSDFLSQDQISSIEKAKTSLDNLEEEIAIKAVDHLSDEDKINFANFSKLNLPEDTRQSLFEKYPELIGSKLDFGSMGSGTSYIADELIKFENKDAFYPSGKKKFDLSFSRDLRKKLSDETRKSYNDALFLEKRTNDKYLKNAKRRKQIVRTVANSLVSKIEELGLTPVINIENLAMSGGFFDGRGKREKGWDNFFKVKKENRWVMKDFHKAFSELSPHHGVIVIESPPYCTSVTCTKCNFCDKKNRNGHKFTCQRCGLDANADLDIATENLEKVAISGKRMPGSERSSDERKVAVARKAKSPKGKAIKGVKCTITDEPALLSANSQDCSQSTS

SEQ ID NO: 85 - protein, 747 aa, synthetic construct
MALSLAEVRERHFKGLRFRSSYLKRAGKILKKEGEAACVAYLTGKDEESPPNFKPPAKCDVVAQSRPFEEWPIVQASVAVQSYVYGLTKEAFEAFNPGTTKQSHEACLAATGIDTCGYSNVQGLNLIFRQAKNRYEGVITKVENRNKKAKKKLTRKNEWRQKNGHSELPEAPEELTFNDEGRLLQPPGINPSLYTYQQISPTPWSPKDSSILPPQYAGYERDPNAPIPFGVAKDRLTIASGCPGYIPEWMRTAGEKTNPRTQKKFMHPGLSTRKNKRMRLPRSVRSAPLGALLVTIHLGEDWLVLDVRGLLRNARWRGVAPKDISTQGLLNLFTGDPVIDTRRGVVTFTYKPETVGIHSRTWLYKGKQTKEVLEKLTQDQTVALVAIDLGQTNPVSAAASRVSRSGENLSIETVDRFFLPDELIKELRLYRMAHDRLEERIREESTLALTEAQQAEVRALEHVVRDDAKNKVCAAFNLDAASLPWDQMTSNTTYLSEAILAQGVSRDQVFFTPNPKKGSKEPVEVMRKDRAWVYAFKAKLSEETRKAKNEALWALKRASPDYARLSKRREELCRRSVNMVINRAKKRTQCQVVIPVLEDLNIGFFHGSGKRLPGWDNFFVAKKENRWLMNGLHKSFSDLAVHRGFYVFEVMPHRTSITCPACGHCDSENRDGEAFVCLSCKRTYHADLDVATHNLTQVAGTGLPMPEREHPGGTKKPGGSRKPESPQTHAPILHRTDYSESADRLGS

SEQ ID NO: 86 - protein, 733 aa, synthetic construct
QAVIKYLSDKGAVDPPDFRPPAKCNIIAQSRPFDEWPICKASMAIQQHIYGLTKNEFDESSPGTSSASHEQWFAKTGVDTHGFTHVQGLNLIFQHAKKRYEGVIKKVENYNEKERKKFEGINERRSKEGMPLLEPRLRTAFGDDGKFAEKPGVNPSIYLYQQTSPRPYDKTKHPYVHAPFELKEITTIPTQDDRLKIPFGAPGHVPEKHRSQLSMAKHKRRRAWYALSQNKPRPPKDGSKGRRSVRDLADLKAASLADAIPLVSRVGFDWVVIDGRGLLRNLRWRKLAHEGMTVEEMLGFFSGDPVIDPRRNVATFIYKAEHATVKSRKPIGGAKRAREELLKATASSDGVIRQVGLISVDLGQTNPVAYEISRMHQANGELVAEHLEYGLLNDEQVNSIQRYRAAWDSMNESFRQKAIESLSMEAQDEIMQASTGAAKRTREAVLTMFGPNATLPWSRMSSNTTCISDALIEVGKEEETNFVTSNGPRKRTDAQWAAYLRPRVNPETRALLNQAVWDLMKRSDEYERLSKRKLEMARQCVNFVVARAEKLTQCNNIGIVLENLVVRNFHGSGRRESGWEGFFEPKRENRWFMQVLHKAFSDLAQHRGVMVFEVHPAYSSQTCPACRYVDPKNRSSEDRERFKCLKCGRSFNADREVATFNIREIARTGVGLPKPDCERSRDVQTPGTARKSGRSLKSQDNLSEPKRVLQSKTRKKITSTETQNEPLATDLKT

SEQ ID NO: 87 - protein, 702 aa, synthetic construct
MIKEQSELSKLIEKYYPGKKFYSNDLKQAGKHLKKSEHLTAKESEELTVEFLKSCKEKLYDFRPPAKALIISTSRPFEEWPIYKASESIQKYIYSLTKEELEKYNISTDKTSQENFFKESLIDNYGFANVSGLNLIFQHTKAIYDGVLKKVNNRNNKILKKYKRKIEEGIEIDSPELEKAIDESGHFINPPGINKNIYCYQQVSPTIFNSFKETKIICPFNYKRNPNDIIQKGVIDRLAIPFGEPGYIPDHQRDKVNKHKKRIRKYYKNNENKNKDAILAKINIGEDWVLFDLRGLLRNAYWRKLIPKQGITPQQLLDMFSGDPVIDPIKNNITFIYKESIIPIHSESIIKTKKSKELLEKLTKDEQIALVSIDLGQTNPVAARFSRLSSDLKPEHVSSSFLPDELKNEICRYREKSDLLEIEIKNKAIKMLSQEQQDEIKLVNDISSEELKNSVCKKYNIDNSKIPWDKMNGFTTFIADEFINNGGDKSLVYFTAKDKKSKKEKLVKLSDKKIANSFKPKISKETREILNKITWDEKISSNEYKKLSKRKLEFARRATNYLINQAKKATRLNNVVLVVEDLNSKFFHGSGKREDGWDNFFIPKKENRWFIQALHKSLTDVSIHRGINVIEVRPERTSITCPKCGCCDKENRKGEDFKCIKCDSVYHADLEVATFNIEKVAITGESMPKPDCERLGGEESIG

SEQ ID NO: 88 - protein, 661 aa, synthetic construct
VAFLDGKEVDEPYTLQPPAKCHILAVSRPIEEWPIARVTMAVQEHVYALPVHEVEKSRPETTEGSRSAWFKNSGVSNHGVTHAQTLNAILKNAYNVYNGVIKKVENRNAKKRDSLAAKNKSRERKGLPHFKADPPELATDEQGYLLQPPSPNSSVYLVQQHLRTPQIDLPSGYTGPVVDPRSPIPSLIPIDRLAIPPGQPGYVPLHDREKLTSNKHRRMKLPKSLRAQGALPVCFRVFDDWAVVDGRGLLRHAQYRRLAPKNVSIAELLELYTGDPVIDIKRNLMTFRFAEAVVEVTARKIVEKYHNKYLLKLTEPKGKPVREIGLVSIDLNVQRLIALAIYRVHQTGESQLALSPCLHREILPAKGLGDFDKYKSKFNQLTEEILTAAVQTLTSAQQEEYQRYVEESSHEAKADLCLKYSITPHELAWDKMTSSTQYISRWLRDHGWNASDFTQITKGRKKVERLWSDSRWAQELKPKLSNETRRKLEDAKHDLQRANPEWQRLAKRKQEYSRHLANTVLSMAREYTACETVVIAIENLPMKGGFVDGNGSRESGWDNFFTHKKENRWMIKDIHKALSDLAPNRGVHVLEVNPQYTSQTCPECGHRDKANRDPIQRERFCCTHCGAQRHADLEVATHNIAMVATTGKSLTGKSLAPQRLQ

SEQ ID NO: 89 - protein, 531 aa, synthetic construct
LEIPEGEPGHVPWFQRMDIPEGQIGHVNKIQRFNFVHGKNSGKVKFSDKTGRVKRYHHSKYKDATKPYKFLEESKKVSALDSILAIITIGDDWVVFDIRGLYRNVFYRELAQKGLTAVQLLDLFTGDPVIDPKKGIITFSYKEGVVPVFSQKIVSRFKSRDTLEKLTSQGPVALLSVDLGQNEPVAARVCSLKNINDKIALDNSCRIPFLDDYKKQIKDYRDSLDELEIKIRLEAINSLDVNQQVEIRDLDVFSADRAKASTVDMFDIDPNLISWDSMSDARFSTQISDLYLKNGGDESRVYFEINNKRIKRSDYNISQLVRPKLSDSTRKNLNDSIWKLKRTSEEYLKLSKRKLELSRAVVNYTIRQSKLLSGINDIVIILEDLDVKKKFNGRGIRDIGWDNFFSSRKENRWFIPAFHKSFSELSSNRGLCVIEVNPAWTSATCPDCGFCSKENRDGINFTCRKCGVSYHADIDVATLNIARVAVLGKPMSGPADRERLGGTKKPRVARSRKDMKRKDISNGTVEVMVTA

SEQ ID NO: 90 - protein, 479 aa, synthetic construct
IPSFGYLDRLKIAKGQPGYIPEWQRETINPSKKVRRYWATNHEKIRNAIPLVVFIGDDWVIIDGRGLLRDARRRKLADKNTTIEQLLEMVSNDPVIDSTRGIATLSYVEGVVPVRSFIPIGEKKGREYLEKSTQKESVTLLSVDIGQINPVSCGVYKVSNGCSKIDFLDKFFLDKKHLDAIQKYRTLQDSLEASIVNEALDEIDPSFKKEYQNINSQTSNDVKKSLCTEYNIDPEAISWQDITAHSTLISDYLIDNNITNDVYRTVNKAKYKTNDFGWYKKFSAKLSKEAREALNEKIWELKIASSKYKKLSVRKKEIARTIANDCVKRAETYGDNVVVAMESLTKNNKVMSGRGKRDPGWHNLGQAKVENRWFIQAISSAFEDKATHHGTPVLKVNPAYTSQTCPSCGHCSKDNRSSKDRTIFVCKSCGEKFNADLDVATYNIAHVAFSGKKLSPPSEKSSATKKPRSARKSKKSRKS

SEQ ID NO: 91 - protein, 452 aa, synthetic construct
SPIEKLLNGLLVKITFGNDWIICDARGLLDNVQKGIIHKSYFTNKSSLVDLIDLFTCNPIVNYKNNVVTFCYKEGVVDVKSFTPIKSGPKTQENLIKKLKYSRFQNEKDACVLGVGVDVGVTNPFAINGFKMPVDESSEWVMLNEPLFTIETSQAFREEIMAYQQRTDEMNDQFNQQSIDLLPPEYKVEFDNLPEDINEVAKYNLLHTLNIPNNFLWDKMSNTTQFISDYLIQIGRGTETEKTITTKKGKEKILTIRDVNWFNTFKPKISEETGKARTEIKRDLQKNSDQFQKLAKSREQSCRTWVNNVTEEAKIKSGCPLIIFVIEALVKDNRVFSGKGHRAIGWHNFGKQKNERRWWVQAIHKAFQEQGVNHGYPVILCPPQYTSQTCPKCNHVDRDNRSGEKFKCLKYGWIGNADLDVGAYNIARVAITGKALSKPLEQKKIKKAKNKT

SEQ ID NO: 92 - protein, 425 aa, synthetic construct
LLDNVQKGIIHKSYFTNKSSLVDLIDLFTCNPIVNYKNNVVTFCYKEGVVDVKSFTPIKSGPKTQENLIKKLKYSRFQNEKDACVLGVGVDVGVTNPFAINGFKMPVDESSEWVMLNEPLFTIETSQAFREEIMAYQQRTDEMNDQFNQQSIDLLPPEYKVEFDNLPEDINEVAKYNLLHTLNIPNNFLWDKMSNTTQFISDYLIQIGRGTETEKTITTKKGKEKILTIRDVNWFNTFKPKISEETGKARTEIKRDLQKNSDQFQKLAKSREQSCRTWVNNVTEEAKIKSGCPLIIFVIEALVKDNRVFSGKGHRAIGWHNFGKQKNERRWWVQAIHKAFQEQGVNHGYPVILCPPQYTSQTCPKCNHVDRDNRSGEKFKCLKYGWIGNADLDVGAYNIARVAITGKALSKPLEQKKIKKAKNKT

SEQ ID NO: 93 - protein, 735 aa, synthetic construct
MIKPTVSQFLTPGFKLIRNHSRTAGLKLKNEGEEACKKFVRENEIPKDECPNFQGGPAIANIIAKSREFTEWEIYQSSLAIQEVIFTLPKDKLPEPILKEEWRAQWLSEHGLDTVPYKEAAGLNLIIKNAVNTYKGVQVKVDNKNKNNLAKINRKNEIAKLNGEQEISFEEIKAFDDKGYLLQKPSPNKSIYCYQSVSPKPFITSKYHNVNLPEEYIGYYRKSNEPIVSPYQFDRLRIPIGEPGYVPKWQYTFLSKKENKRRKLSKRIKNVSPILGIICIKKDWCVFDMRGLLRTNHWKKYHKPTDSINDLFDYFTGDPVIDTKANVVRFRYKMENGIVNYKPVREKKGKELLENICDQNGSCKLATVDVGQNNPVAIGLFELKKVNGELTKTLISRHPTPIDFCNKITAYRERYDKLESSIKLDAIKQLTSEQKIEVDNYNNNFTPQNTKQIVCSKLNINPNDLPWDKMISGTHFISEKAQVSNKSEIYFTSTDKGKTKDVMKSDYKWFQDYKPKLSKEVRDALSDIEWRLRRESLEFNKLSKSREQDARQLANWISSMCDVIGIENLVKKNNFFGGSGKREPGWDNFYKPKKENRWWINAIHKALTELSQNKGKRVILLPAMRTSITCPKCKYCDSKNRNGEKFNCLKCGIELNADIDVATENLATVAITAQSMPKPTCERSGDAKKPVRARKAKAPEFHDKLAPSYTVVLREAVKRPAATKKAGQAKKKKEF

SEQ ID NO: 94 - protein, 753 aa, synthetic construct
SNAPKKKRKVGIHGVPAAMIKPTVSQFLTPGFKLIRNHSRTAGLKLKNEGEEACKKFVRENEIPKDECPNFQGGPAIANIIAKSREFTEWEIYQSSLAIQEVIFTLPKDKLPEPILKEEWRAQWLSEHGLDTVPYKEAAGLNLIIKNAVNTYKGVQVKVDNKNKNNLAKINRKNEIAKLNGEQEISFEEIKAFDDKGYLLQKPSPNKSIYCYQSVSPKPFITSKYHNVNLPEEYIGYYRKSNEPIVSPYQFDRLRIPIGEPGYVPKWQYTFLSKKENKRRKLSKRIKNVSPILGIICIKKDWCVFDMRGLLRTNHWKKYHKPTDSINDLFDYFTGDPVIDTKANVVRFRYKMENGIVNYKPVREKKGKELLENICDQNGSCKLATVDVGQNNPVAIGLFELKKVNGELTKTLISRHPTPIDFCNKITAYRERYDKLESSIKLDAIKQLTSEQKIEVDNYNNNFTPQNTKQIVCSKLNINPNDLPWDKMISGTHFISEKAQVSNKSEIYFTSTDKGKTKDVMKSDYKWFQDYKPKLSKEVRDALSDIEWRLRRESLEFNKLSKSREQDARQLANWISSMCDVIGIENLVKKNNFFGGSGKREPGWDNFYKPKKENRWWINAIHKALTELSQNKGKRVILLPAMRTSITCPKCKYCDSKNRNGEKFNCLKCGIELNADIDVATENLATVAITAQSMPKPTCERSGDAKKPVRARKAKAPEFHDKLAPSYTVVLREAVKRPAATKKAGQAKKKKEF

SEQ ID NO: 95 - protein, 809 aa, synthetic construct
MIKNPSNRHSLPKVIISEVDHEKILEFKIKYEKLARLDRFEVKAMHYEGKEIVFDEVLVNGGLIEVEYQDDNKTLFVKVGEKSYSIRGKKVGGKQRLLEDRVSKTKVQLELSDGVVDNKGNLRKSRTERELIVADNIKLYSQIVGREVTTTKEIYLVKRFLAYRSDLLFYYSFVDNFFKVAGNEKELWKINFDDATSAQFMGYIPFMVNDNLKNDNAYLKDYVRNDVQIKDDLKKVQTIFSALRHTLLHFNYEFFEKLFNGEDVGFDFDIGFLNLLIENIDKLNIDAKKEFIDNEKIRLFGENLSLAKVYRLYSDICVNRVGFNKFINSMLIKDGVENQVLKAEFNRKFGGNAYTIDIHSNQEYKRIYNEHKKLVIKVSTLKDGQAIRRGNKKISELKEQMKSMTKKNSLARLECKMRLAFGFLYGEYNNYKAFKNNFDTNIKNSQFDVNDVEKSKAYFLSTYERRKPRTREKLEKVAKDIESLELKTVIANDTLLKFILLMFVFMPQELKGDFLGFVKKYYHDVHSIDDDTKEQEEDVVEAMSTSLKLKILGRNIRSLTLFKYALSSQVNYNSTDNIFYVEGNRYGKIYKKLGISHNQEEFDKTLVVPLLRYYSSLFKLMNDFEIYSLAKANPTAVSLQELVDDETSPYKQGNYFNFNKMLRDIYGLTSDEIKSGQVVFMRNKIAHFDTEVLLSKPLLGQTKMNLQRKDIVSFIEARGDIKELLGYDAINDFRMKVIHLRTKMRVYSDKLQTMMDLLRNAKTPNDFYNVYKVKGVESINKHLLEVLAQTAEERTVEKQIRDGNEKYDL

SEQ ID NO: 96 - protein, 840 aa, synthetic construct
MLKHKRKNKNSLARVVLSNYDSNNIYEIKIKYEKLAKLDKINIIEMDYDADNNVMFKKVLFNNKEIDLSHKDKTKINIELDNKKYNISAKKQIGKTHLVVRDKQTSKISRIKKIQDTYYRGKDVFILDNNIEILDKKQTKDKFIVTLNDITNDKTTSTEAELIDDTKDIFKKISAKKDLKSSDIYKIKRFISIRSNFSFYYTFVDNYFKIFHAKKDKNKEELYKIKFKDEINIKPYLENILDNMKNKNGILYDYADDREKVLNDLKNIQYVFTEFRHKLAHFDYNFLDNFFSNSVTDQYKQKVNEIKLLDILLDNIDSLNVVPKQNYIEDETISVFDAKDIKLKRLYTYYIKLTINYPGFKKLINSFFIQDGIENQELKEYINNKEKDTQVLKELDNKAYYMDISQYRKYKNIYNKHKELVSEKELSSDGQKINSLNQKINKLKIEMKNITKPNALNRLIYRLRVAFGFIYKEYATINNFNKSFLQDTKIKRFENISQQDIKNYLDISYQDKGKFFVKSKKTFKNKTTIKYTFEDLDLTLNEIITQDDIFVKVIFLFSIFMPKELNGDFFGFINMYYHKMKNISYDTKDIDMLDTISQNMKLKILEQNIKKTYVFKYYLDLDSSIYSKLVQNIKITEDIDSKKYLYAKIFKYYQHLYKLISDVEIYLLYKYNSKENLSITIDKDELKHRGYYNFQSLLIKNNINKDDAYWSIVNMRNNLSHQNIDELVGHFCKGCLRKSTTDIAELWLRKDILTITNEIINKIESFKDIKITLGYDCVNDFTQKVKQYKQKLKASNERLAKKIEEKQNQVVDEKNKEELEKKILNMKNIQKINRYILDIL

SEQ ID NO: 97 - protein, 849 aa, synthetic construct
MSQLKNPSNKNSLPRIIISDFNEIKINEIKIKYHKLDRLDKIIVKEMEIINNKIFFKKILFNNQIKDINSENIELENYILAGEVKPSNTKIILNRDGKEKSFIVYDGFTFKYKPNDKRISETKTNAKYILTIKDKTRHRESSTQRDILKSSIIETYKQISGFENITSKDIYTIKRYIDFKNEMMFYYTFIDDFFFPITGKNKQDKKNNFYNYKIKENAKKFISLINYRINDDFKNKNGILYDYLSNKEEIIINDFIHIQTILKDVRHAIAHFNFDFIQKLFDNEQAFNSKFDGIEILNILFNQKQEKYFEAQTNYIEEETIKILDEKELSFKKLHSFYSQICQKKPAFNKLINSFIIQDGIENKELKDYISQKYNSKFDYYLDIHTCKIYKDIYNQHKKFVADKQFLENQKTDGQKIKKLNDQINQLKTKMNNLTKKNSLKRLEIKFRLAFGFIFTEYQTFKNFNERFIEDIKANKYSTKIELLDYGKIKEYISITHEEKRFFNYKTFNKKTNKNINKTIFQSLEKETFENLVKNDNLIKMMFLFQLLLPRELKGEFLGFILKIYHDLKNIDNDTKPDEKSLSELNISTALKLKILVKNIRQINLFNYTISNNTKYEEKEKRFYEEGNQWKDIYKKLYISHDFDIFDIHLIIPIIKYNINLYKLIGDFEVYLLLKYLERNTNYKTLDKLIEAEELKYKGYYNFTTLLSKAINIALNDKEYHNITHLRNNTSHQDIQNIISSFKNNKLLEQRENIIELISKESLKKKLHFDPINDFTMKTLQLLKSLEVHSDKSEKIENLLKKEPLLPNDVYLLYKLKGIEFIKKELISNIGITKYEEKIQEKIAKGVEK

SEQ ID NO: 98 - protein, 779 aa, synthetic construct
ELCKIDFTDARSSSLIEYFKFAINDNLKNDRGYLKAYVNDVEQIRADLKKVGGKQRNLEDRVSRTKVQLTLTNHIEDREGKQRVSRTERELIVPQNIKLYSQIVGREVKTTKEIYLIKRFLEYRSDLLFYYGFVDNFFKVEGNKKELCKIDFTDARSSSLIEYFKFAINDNLKNDRGYLKAYVNDVEQIRTDLQKVKTIFSKLRHALMHFDYDFFEKLFNGEEVGFDFDIKFLNIMIDKVEKLNIETKKEFIEDEVITLFGERLSLKKLYGLFSHIAINRVAFNKFINSFLIKDGIENRALKDFFNDEKGSQAYEIDIHSNAEYKALYVQHKKLVMATSAMSDGNEIAKKNQEISELKEKMNAITKANSLARLEYKLRLAFGFIYTEYGDYTAFKNSFDRDVKSAKYKELSVERLKAYYLATFKASKPQSHEKLEEVAKKIDRLSLKQLIENETLLKFVLLLFTFMPQELKGEFLGFIKKYYHDKKHIEQDTKEKEEEREGLSTGLKLKVLEKNIRSLSILKHALSFQVKYNKKDKNFYEEGNLHGKFYKKLAISHNQEEFNKSVYAPLFRYYVALYKLINDFEIYSLAQHIVNNETLADQVGKAQFRQRGYFNFRKLVNCTYATAQNSSYNVLIFMRNDISHLSYEPLFNCPLEEKASYKQKIRGREKIISVKPLSESRAEIVRFIASQTDMKKLLGYDAVNDFNMKMVQLRRRLSVYANKQETIEKMINKAKTPNDFYNLYKLKGIECINQHLLKVIGVTEAEKRIEKQIEEGNEKY

SEQ ID NO: 99 - protein, 802 aa, synthetic construct
MLKKPSNRYALPKVILSTVDHEKILEFKVKYEKLARLDRLVVERMHFDGESVVFDEVIANSGDLEIAYQDDHRKLLIQAAGKSYTITGKKVGGKKRKLEERISRAKIQLTLTDGQEDQHRRIRATVTEKALLEPKEDRDIYSKISDRKIKTSKEIYLVKRFLSYRSDLLFYYFFVDNFFKVGNNKQELWKIKFQNQPELIEYFRFIINDRFKNAKNDKFDNYLKNDKAIQEDLEKIQKVFEKLRHALMHYDYGFFEKLFGGEDQGFDLDIAFLDNFVKKIDKLNIDTKKEFVDDEKIKIFGEDLNLADLYKLYASISINRVGFNRVVNEMIIKDGIEKSELKRAFEKKLDKTYALDIHSDPSYKKLYNEHKRLVTEVSTYTDGNKIKEGNQKIAKLKYEMKEITKKNALVRLECKMRLAFGLIYGRYDTHEAFKNGFDTDLKRGEFAQIGSEEAIGYFNTTFEKSKPKSKEEIKKIARQIDNLSLSTLIEDDPLMKFIVLMFLFVPRELKGEFLGFWRKYYHDIHSIDSDAKSDEMPDEVSLSLKLKILTRNIRRLNLFEYSLSEKIKYSPKNTQFYTDKSPYQKVYKRLKISHNKEEFDKTLLVPLFRYYSILFKLINDFEIYSLAKANPDASSLSELTKTKHGFRGHYNFTTLMMDAHKVSQGDSKKHFGIRGEIAHINTKDLIYDPLFRKSKMAQQRNDVIDFVLKYEKEIKAVLGYDAINDFRMKVVQLRTKLKVYSDKTQTIEKLLNEVEAPDDFYVLYKVKGVEAINKYLLEIVSVTQAEEEIERKIITGNKRYNT

SEQ ID NO: 100 - protein, 840 aa, synthetic construct
MLKHKRKNKNSLARVVLSNYDSNNIYEIKIKYEKLAKLDKINIIEMDYDADNNVMFKKVLFNNKEIDLSHKDKTKINIELDNKKYNISAKKQIGKTHLVVRNKQTSKISRIKKIQDTYYRGKDVFILDNNIEILDKKQTKDKFIVTLNDITNNKTTSTEAELIDDTKDIFKKISAKKDLKSSDIYKIKRFISIRSNFSFYYTFVDNYFKIFHAKKDKNKEELYKIKFKDEINIKPYLENILDNMKNKNGILYNYANDRKKVLNDLRNIQYVFKEFRHKLAHFDYNFLDNFFSNSVEEKYKQKVNEIKLLDILLDNIDSLNVVPKQNYIEDETISVFDAKDIKLKRLYTYYIKLTINYPGFKKLINSFFIQDGIENQELKEYINNKEKDTQVLKELDNKAYYMDISQYRKYKNIYNKHKELVSEKELSSDGKKINSLNQKINKLKIDMKNITKPNALNRLIYRLRVAFGFIYKEYATINNFNKSFLQDTKTKRFENISQQDIKSYLDISYQDKGKFFVKSKKTFKNKTTVKYTFEDLDLTLNEIITQDDIFVKVIFLFSIFMPKELNGDFFGFINMYYHKMKNISYDTKDIDMLDTISQNMKLKILEQNIKKTYVFKYYLDLDSSIYSKLVQNIKITEDIDSKKYLYAKIFKYYQHLYKLISDVEIYLLYKYNSKENLSITIDKDELKHRGYYNFQSLLIKNNINKDDAYWSIVNMRNNLSHQNIDELVGHFCKGCLRKSTTDIAELWLRKDILTITNEIINKIESFKDIKITLGYDCVNDFTQKVKQYKQKLKASNERLAKKIEEKQNQVVDEKNKEELEKNILNMKNIQKINRYILDIL

SEQ ID NO: 101 - protein, 845 aa, synthetic construct
MIKKPSNRHALPKVIISKVDNQNILEFKIKYKKLSRLDRVEIKTMHYDDRAIVFDEVIINGGLIDVEYRDNHKTIFVKVGDKSYSISGQKVGGKERLLENRISQTKVQLELKDEATNRVSKTERELIVDDNIKLYSQIVGRDVKTTKDIYLIKRFLGYRSDLLFYYGFVNNFFHVANNRPEFWKIDFNDNRNSKLIEYFIFTINDHLKNDENYLKDYISDRGQIVDDLENIKHIFSALRHGLMHFDYDFFEALFNGEDIDIKMDNQGNTQPLSSLNIKFLDIMIDKLDKLNIDTKKEFIDAEKITIFGEELSLAKLYRFYAHTAINRVAFNKLINSFIIENGVENQSLKEYFNQQAGGIAYEIDIHQNREYKNLYNEHKKLVSRVLSISDGQEIATLNQKIVELKEQMKQITKINSIKRLEYKLRLAFGFIYTEYKNYEEFKNSFDTDIKNGRFTPKDEDGNKRAFDSRELEHLKGYYKATLQTQKPQTDEKMEEVSKRVDRLSLKSLIGDDTLLKFILLMFTFMPQELKGEFLGFIKKYYHDTKHIDQDTISDSDDTIEEGLSIGLKLKILDKNIRSLSILKHSLSFQTKYNKKDRSYYEDGNIHGKFFKKLGISHNQEEFNKSVYAPLFRYYSALYKLINDFEIYTLSLHIVGNETLSDQVNKPQFLSGRYFNFRKLLTQSYNISNNSTHSVIFNAVINMRNDISHLSYEPLLDCPLNGKKSYKRKIRNQFRTINIKPLVESRKMIIDFITLQTDMQKVLGCDAVNDFTMKIVQLRTRLKAYANKEQTIEKMITEAKTPNDFYNIYKVKGVEAINKYLLEVIGETQVEKEIREEIERGNIANS

SEQ ID NO: 102 - protein, 822 aa, synthetic construct
MVKNPANRHALPKVIISEVDNNNILEFKIKYEKLARLDKVEVKSMHFDNNKQVVFDEVVINGGLIEPTYEDKHKKLVVTAGEKSYSIVGQKVGGKPRLLEDRVSKTKVQLELTNYVEDKEGKKRVSKTERELIVADNIELYSQIVGREVKTTKEIYLIKRFLEYRSDLLFYYGFVDNFFKVAGNGKELWKIDFTNSDSLHLIEYFKFSINDNLKNDENYLKNYVSDNTKIENDLVKCQNNFNSLRHALMHFDYDFFEKLFNGEDVGFDFDIEFLNIMIDKVDKLNIDTKKEFIDDEEVTLFGEALSLKKLYGLFSHIAINRVAFNKLINSFIIEDGIENKELKDFFNNKKESQAYEIDIHSNAEYKALYVQHKKLVMATSAMTDGDEIAKKNQEISDLKEKMKVITKENSLARLEHKLRLAFGFIYTEYKDYKTFKKHFDQDIKGAKYKGLNVEKLKEYYETTLKNSKPKTDEKLEDVAKKIDKLSLKELIDDDTLLKFVLLLFIFMPQELKGDFLGFIKKYYHDKKHIDQDTKDKDTEIEELSTGLKLKVLDKNIRSLSILKHSFSFQVKYNRKDKNFYEDGNLHGKFYKKLSISHNQEEFNKSVYAPLFRYYSALYKLINDFEIYALAQHVENHETLADQVNKSQFIQKSYFNFRKLLDNTDSISQSSSYNTLIVMRNDISHLSYEPLFNYPLDERKSYKKKTQKGVKTFHVELLYISRAKIIELISLQTDMKKLLGYDAVNDFNMKVVHLRKRLSVYANKEESIRKMQADAKTPNDFYNIYKVKGVESINQHLLKVIGVTEAEKSIEKQINEGNKKHNT

SEQ ID NO: 103 - protein, 832 aa, synthetic construct
MIKNPSNRYALPKVIISKIDNQNILEFKIKYKKLSKLDIVKVKSMHYDDRAIIFDEVIVNDGLIDVEYRDNHKTIFVKVGNKSYSISGQKVGGKERLLENRVSKTKVQLELKDKATNRVSKTERELIVDDNIKIYSQIVGRDVKTTKDIYLIKRFLAYRSDLLFYYGFVNNFFHVANNRSEFWKIDFNDSNNSKLIEYFKFTINDHLKNDENYLKDYISDNEKLKNDLIKVKNSFEKIRHALMHFDYDFFVKLFNGEDVGLELDIEFLDIMIDKLDKLNIDTKKEFIDDEKITIFGEELSLAKLYRFYAHTAINRVAFNKLINSFIIENGVENQSLKEYFNQQAGGIAYEIDIHQNREYKNLYNEHKKLVSRVLSISDGQEIAILNQKIAKLKDQMKQITKANSIKRLEYKLRLALGFIYTEYENYEEFKNNFDTDIKNGRFTPKDNDGNKRAFDSRELEQLKGYYEATIQTQKPKTDEKIEEVSKKIDRLSLKSLIADDILLKFILLMFTFMPQELKGEFLGFIKKYYHDTKHIDQDTISDSDDTIETLSIGLKLKILDKNIRSLSILKHSLSFQTKYNKKDRNYYEDGNIHGKFFKKLGISHNQEEFNKSVYAPLFRYYSALYKLINDFEIYTLSLHIVGSETLTDQVNKSQFLSGRYFNFRKLLTQSYHINNNSTHSTIFNAVINMRNDISHLSYEPLFDCPLNGKKSYKRKIRNQFKTINIKPLVESRKIIIDFITLQTDMQKVLGYDAVNDFTMKIVQLRTRLKAYANKEQTIQKMITEAKTPNDFYNIYKVQGVEEINKYLLEVIGETQAEKEIREKIERGNIANF

SEQ ID NO: 104 - protein, 806 aa, synthetic construct
MTKKPSNRNSLPKVIINKVDESSILEFKIKYEKLARLDRFEVRSMRYDGDGRIIFDEVVANAGLLDVDYEDDNRTIVVKIENKAYNIYGKKVGGEKRLNGKISKAKVQLILTDSIRKNANDTHRHSLTERELINKNEVDLYSKIAEREISTTKDIYLVKRFLAYRSDLLLYYAFINHYVRVNGNKKEFWKTEIDDKIIDYFIYTINDTLKNKEGYLEKYIVDRDQIKKDLEKIKQIFSHLRHKLMHYDFRFFTDLFDGKDVDIKVDNSIQKISELLDIEFLNIVIDKLEKLNIDAKKEFIDDEKITLFGQEIELKKLYSLYAHTSINRVAFNKLINSFLIKDGVENKELKEYFNAHNQGKESYYIDIHQNQEYKKLYIEHKNLVAKLSATTDGKEIAKINRELADKKEQMKQITKANSLKRLEYKLRLAFGFIYTEYKDYERFKNSFDTDTKKKKFDAIDNAKIIEYFEATNKAKKIEKLEEILKGIDKLSLKTLIQDDILLKFLLLFFTFLPQEIKGEFLGFIKKYYHDITSLDEDTKDKDDEITELPRSLKLKIFSKNIRKLSILKHSLSYQIKYNKKESSYYEAGNVFNKMFKKQAISHNLEEFGKSIYLPMLKYYSALYKLINDFEIYALYKDMDTSETLSQQVDKQEYKRNEYFNFETLLRKKFGNDIEKVLVTYRNKIAHLDFNFLYDKPINKFISLYKSREKIVNYIKNHDIQAVLKYDAVNDFVMKVIQLRTKLKVYADKEQTIESMIQNTQNPNGFYNIYKVKAVENINRHLLKVIGYTESEKAVEEKIRAGNTSKS

SEQ ID NO: 105 - protein, 835 aa, synthetic construct
MEKIKKPSNRNSIPSIIISDYDANKIKEIKVKYLKLARLDKITIQDMEIVDNIVEFKKILLNGVEHTIIDNQKIEFDNYEITGCIKPSNKRRDGRISQAKYVVTITDKYLRENEKEKRFKSTERELPNNTLLSRYKQISGFDTLTSKDIYKIKRYIDFKNEMLFYFQFIEEFFNPLLPKGKNFYDLNIEQNKDKVAKFIVYRLNDDFKNKSLNSYITDTCMIINDFKKIQKILSDFRHALAHFDFDFIQKFFDDQLDKNKFDINTISLIETLLDQKEEKNYQEKNNYIDDNDILTIFDEKGSKFSKLHNFYTKISQKKPAFNKLINSFLSQDGVPNEEFKSYLVTKKLDFFEDIHSNKEYKKIYIQHKNLVIKKQKEESQEKPDGQKLKNYNDELQKLKDEMNTITKQNSLNRLEVKLRLAFGFIANEYNYNFKNFNDEFTNDVKNEQKIKAFKNSSNEKLKEYFESTFIEKRFFHFSVNFFNKKTKKEETKQKNIFNSIENETLEELVKESPLLQIITLLYLFIPRELQGEFVGFILKIYHHTKNITSDTKEDEISIEDAQNSFSLKFKILAKNLRGLQLFHYSLSHNTLYNNKQCFFYEKGNRWQSVYKSFQISHNQDEFDIHLVIPVIKYYINLNKLMGDFEIYALLKYADKNSITVKLSDITSRDDLKYNGHYNFATLLFKTFGIDTNYKQNKVSIQNIKKTRNNLAHQNIENMLKAFENSEIFAQREEIVNYLQTEHRMQEVLHYNPINDFTMKTVQYLKSLSVHSQKEGKIADIHKKESLVPNDYYLIYKLKAIELLKQKVIEVIGESEDEKKIKNAIAKEEQIKKGNN

SEQ ID NO: 106 - protein, 847 aa, synthetic construct
MMTKKPANRHALPKVIISEVDNTNILEFKIKYEKLARLDRVEVKAMHYEDGRIIFDEVVVNGGLIEVEYQDDHKTLFVQVGEKSYSISGQKVGGKQRLLEDRVSKTKVQLELSDGSSERVSRTERELIVADNIKLYSQIVGHEVKTTKEIYLAKRFLGYRSDLLFYYGFVDNFFRESKNLKYGKQPVELWEDKFQVNDKLTAYTKFMFNDDLQNSESYLKEYVKDNHKIKNDLESARDIFATFRHNLMHFNYSFFTRLFNGEDVKIKNLQTKKFESLSDVLRNVEFLNKVIQSIDKLNIDTRKEFIDKEKITLFNEELDLQQLYGFFAYTAINRVAFNKLINSFIIKDGIENEQLKEYFNQRVDGTAYEIDIHQNREYKELYKKHKNLVSKVSTLSDGKEIARGNTEISVLKEQMNKITKANSLKRLEHKLRLAFGFIYTEYGSYKAFVSRFNEDTKRKKIKNVEFEKIGVEKQKEYYESTFTSNNKDKLGELIQEYEKLSLNDLIENDTFLKVILLLFIFMPKEVKGDFLGFIKKYYHDTKHIEEDTKEKDEGFTNTLPIGLKLKIVERNIAKLSVLKHSLSLKVKYNRGQYEEDNTYRKVFKKLNISHNQEEFHKSMFSPLLRYYASLYKLINDFEIYTLSHYITDKYSTLNKVIASEQFHYRYGWNREEKKGELVKTDNYTFSTLLSKKYGHKNSQEISEMRNKISHFDEKILFKFPLEEVSSVPKGKGKYKKDEPIKSLKEKREEIVSLMEKQTDMQKVLGYDAINDFRMKTVQFQTKLKVYSNKEETIKKMIVEAKTPNDYYNIYKVKGVEGINEHLLNVIGETEAEKSIQEQIAEGNKVNV

SEQ ID NO: 107 - protein, 492 aa, synthetic construct
MAGKKKDKDVINKTLSVRIIRPRYSDDIEKEISDEKAKRKQDGKTGELDRAFFSELKSRNPDIITNDELFPLFTEIQKNLTEIYNKSISLLYMKLIVEEEGGSTASALSAGPYKECKARFNSYISLGLRQKIQSNFRRKELKGFQVSLPTAKSDRFPIPFCHQVENGKGGFKVYETGDDFIFEVPLIKYTATNKKSTSGKNYTKVQLNNPPVPMNVPLLLSTMRRRQTKKGMQWNKDEGTNAELRRVMSGEYKVSYAEIIRRTRFGKHDDWFVNFSIKFKNKTDELNQNVRGGIDIGVSNPLVCAVTNGLDRYIVANNDIMAFNERAMARRRTLLRKNRFKRSGHGAKNKLEPITVLTEKNERFRKSILQRWAREVAEFFKRTSASVVNMEDLSGITEREDFFSTKLRTTWNYRLMQTTIENKLKEYGIAVNYISPKYTSQTCHSCGKRNDYFTFSYRSENNYPPFECKECNKVKCNADFNAAKNIALKVVL

SEQ ID NO: 108 - protein, 477 aa, synthetic construct
MRISKTLSLRIVRPFYTPEVEAGIKAEKDKREAQGQTRSLDAKFFNELKKKHSEIILSSEFYSLLSEVQRQLTSIYNHAMSNLYHKIIVEGEKTSTSKALSNIGYDECKAIFPSYMALGLRQKIQSNFRRRDLKNFRMAVPTAKSDKFPIPIYRQVDGSKGGFKISENDGKDFIVELPLVDYVAEEVKTAKGRFTKINISKPPKIKNIPVILSTLRRRQSGQWFSDDGTNAEIRRVISGEYKVSWIEIVRRTRFGKHDDWFVNMVIKYDKPEEGLDSKVVGGIDVGVSSPLVCALNNSLDRYFVKSSDIIAFNKRAMARRRTLLRQNKYKRSGHGSKNKLEPITVLTEKNERFKKSIMQRWAKEVAEFFRGKGASVVRMEELSGLKEKDNFFSSYLRMYWNYGQLQQIIENKLKEYGIKVNYVSPKDTSKKCHSCTHINEFFTFEYRQKNNFPLFKCEKCGVECSADYNAAKNMAIA

SEQ ID NO: 109 - protein, 478 aa, synthetic construct
MKDYIRKTLSLRILRPYYGEEIEKEIAAAKKKSQAEGGDGALDNKFWDRLKAEHPEIISSREFYDLLDAIQRETTLYYNRAISKLYHSLIVEREQVSTAKALSAGPYHEFREKFNAYISLGLREKIQSNFRRKELARYQVALPTAKSDTFPIPIYKGFDKNGKGGFKVREIENGDFVIDLPLMAYHRVGGKAGREYIELDRPPAVLNVPVILSTSRRRANKTWFRDEGTDAEIRRVMAGEYKVSWVEILQRKRFGKPYGGWYVNFTIKYQPRDYGLDPKVKGGIDIGLSSPLVCAVTNSLARLTIRDNDLVAFNRKAMARRRTLLRQNRYKRSGHGSANKLKPIEALTEKNELYRKAIMRRWAREAADFFRQHRAATVNMEDLTGIKDREDYFSQMLRCYWNYSQLQTMLENKLKEYGIAVKYIEPKDTSKTCHSCGHVNEYFDFNYRSAHKFPMFKCEKCGVECGADYNAARNIAQA

SEQ ID NO: 110 - protein, 477 aa, synthetic construct
VKISKTLSLRIIRPYYTPEVESAIKAEKDKREAQGQTRNLDAKFFNELKKKHPQIILSGEFYSLLFEMQRQLTSIYNRAMSSLYHKIIVEGEKTSTSKALSDIGYDECKSVFPSYIALGLRQKIQSNFRRKELKGFRMAVPTAKSDKFPIPIYKQVDDGKGGFKISENKEGDFIVELPLVEYTAEDVKTAKGKFTKINISKPPKIKNIPVILSTLRRKQSGQWFSDEGTNAEIRRVISGEYKVSWIEVVRRTRFGKHDDWFLNIVIKYDKTEDGLDPEVVGGIDVGVSTPLVCAVNNSLDRYFVKSSDIIAFKKRAMARRRTLLRQNRFKRSGHGSKSKLEPITILTEKNERFKKSIMQRWAKEVAEFFKGERASVVQMEELSGLKEKDNFFGSYLRMYWNYGQLQQIIENKLKEYGIKVNYVSPKDTSKKCHSCGYINEFFTFEFRQKNNFPLFKCKKCGVECNADYNAAKNIAIA

SEQ ID NO: 111 - protein, 472 aa, synthetic construct
VPITKTISLRILRPYYPPEIEAKIKAEKEKRKENGDTGSLNSSYYRELKKEYPSIIINDEFFPLLSEMQRNITSIYNRTISHLYHRLIIKKESISTAKALSEGPYRDFKSTFNSYIALGLRQKVQSNFRKKDLMAFKIALPTAKSDKFPIPIYMQTNFKIKESPDSDFIIELPLVEYIAKETKGKNKMFTKVEILSPPKVKNIPVILSTRRRKESGQWFSDEGTNAEIRRIISGEYKVSWIEIVKRTRFGKHDWFVNMVISFEESQEGLDPDVIGGIDIGVSKPLICAINNSLDRYIVKGDDIIAFNRRALSRRRSLLRRNRLKRSGHGSRNKLEPITVLTEKNERFKKSIMQRWAKEVAEFFKSKRASIVQMEELTGIKEREDFFSKTLRMYWNYGQLQKTVENKLREYGIEVRYASPKDTSRRCHSCGHINDYFTFEFRQQNNFPLFKCMNCGIECSADYNAARNIAIAR

SEQ ID NO: 112 - protein, 500 aa, synthetic construct
MEVQKTVMKTLSLRILRPLYSQEIEKEIKEEKERRKQAGGTGELDGGFYKKLEKKHSEMFSFDRLNLLLNQLQREIAKVYNHAISELYIATIAQGNKSNKHYISSIVYNRAYGYFYNAYIALGICSKVEANFRSNELLTQQSALPTAKSDNFPIVLHKQKGAEGEDGGFRISTEGSDLIFEIPIPFYEYNGENRKEPYKWVKKGGQKPVLKLILSTFRRQRNKGWAKDEGTDAEIRKVTEGKYQVSQIEINRGKKLGEHQKWFANFSIEQPIYERKPNRSIVGGLDVGIRSPLVCAINNSFSRYSVDSNDVFKFSKQVFAFRRRLLSKNSLKRKGHGAAHKLEPITEMTEKNDKFRKKIIERWAKEVTNFFVKNQVGIVQIEDLSTMKDREDHFFNQYLRGFWPYYQMQTLIENKLKEYGIEVKRVQAKYTSQLCSNPNCRYWNNYFNFEYRKVNKFPKFKCEKCNLEISADYNAARNLSTPDIEKFVAKATKGINLPEK

SEQ ID NO: 113 - protein, 507 aa, synthetic construct
MEEAKTVSKTLSLRILRPLYSAEIEKEIKEEKERRKQGGKSGELDSGFYKKLEKKHTQMFGWDKLNLMLSQLQRQIARVFNQSISELYIETVIQGKKSNKHYTSKIVYNRAYSVFYNAYLALGITSKVEANFRSTELLMQKSSLPTAKSDNFPILLHKQKGVEGEEGGFKISADGNDLIFEIPIPFYEYDSANKKEPFKWIKKGGQKPTIKLILSTFRRQRNKGWAKDEGTDAEIRKVIEGKYQVSHIEINRGKKLGDHQKWFVNFTIEQPIYERKLDKNIIGGIDVGIKSPLVCAVNNSFARYSVDSNDVLKFSKQAFAFRRRLLSKNSLKRSGHGSKNKLDPITRMTEKNDRFRKKIIERWAKEVTNFFIKNQVGTVQIEDLSTMKDRQDNFFNQYLRGFWPYYQMQNLIENKLKEYGIETKRIKARYTSQLCSNPSCRHWNSYFSFDHRKTNNFPKFKCEKCALEISADYNAARNISTPDIEKFVAKATKGINLPDKNENVILE

SEQ ID NO: 114 - protein, 529 aa, synthetic construct
MAKNTITKTLKLRIVRPYNSAEVEKIVADEKNNREKIALEKNKDKVKEACSKHLKVAAYCTTQVERNACLFCKARKLDDKFYQKLRGQFPDAVFWQEISEIFRQLQKQAAEIYNQSLIELYYEIFIKGKGIANASSVEHYLSDVCYTRAAELFKNAAIASGLRSKIKSNFRLKELKNMKSGLPTTKSDNFPIPLVKQKGGQYTGFEISNHNSDFIIKIPFGRWQVKKEIDKYRPWEKFDFEQVQKSPKPISLLLSTQRRKRNKGWSKDEGTEAEIKKVMNGDYQTSYIEVKRGSKIGEKSAWMLNLSIDVPKIDKGVDPSIIGGIDVGVKSPLVCAINNAFSRYSISDNDLFHFNKKMFARRRILLKKNRHKRAGHGAKNKLKPITILTEKSERFRKKLIERWACEIADFFIKNKVGTVQMENLESMKRKEDSYFNIRLRGFWPYAEMQNKIEFKLKQYGIEIRKVAPNNTSKTCSKCGHLNNYFNFEYRKKNKFPHFKCEKCNFKENADYNAALNISNPKLKSTKEEP

SEQ ID NO: 115 - protein, 726 aa, synthetic construct
MERQKVPQIRKIVRVVPLRILRPKYSDVIENALKKFKEKGDDTNTNDFWRAIRDRDTEFFRKELNFSEDEINQLERDTLFRVGLDNRVLFSYFDFLQEKLMKDYNKIISKLFINRQSKSSFENDLTDEEVEELIEKDVTPFYGAYIGKGIKSVIKSNLGGKFIKSVKIDRETKKVTKLTAINIGLMGLPVAKSDTFPIKIIKTNPDYITFQKSTKENLQKIEDYETGIEYGDLLVQITIPWFKNENKDFSLIKTKEAIEYYKLNGVGKKDLLNINLVLTTYHIRKKKSWQIDGSSQSLVREMANGELEEKWKSFFDTFIKKYGDEGKSALVKRRVNKKSRAKGEKGRELNLDERIKRLYDSIKAKSFPSEINLIPENYKWKLHFSIEIPPMVNDIDSNLYGGIDFGEQNIATLCVKNIEKDDYDFLTIYGNDLLKHAQASYARRRIMRVQDEYKARGHGKSRKTKAQEDYSERMQKLRQKITERLVKQISDFFLWRNKFHMAVCSLRYEDLNTLYKGESVKAKRMRQFINKQQLFNGIERKLKDYNSEIYVNSRYPHYTSRLCSKCGKLNLYFDFLKFRTKNIIIRKNPDGSEIKYMPFFICEFCGWKQAGDKNASANIADKDYQDKLNKEKEFCNIRKPKSKKEDIGEENEEERDYSRRFNRNSFIYNSLKKDNKLNQEKLFDEWKNQLKRKIDGRNKFEPKEYKDRFSYLFAYYQEIIKNESES

SEQ ID NO: 116 - protein, 517 aa, synthetic construct
MVPTELITKTLQLRVIRPLYFEEIEKELAELKEQKEKEFEETNSLLLESKKIDAKSLKKLKRKARSSAAVEFWKIAKEKYPDILTKPEMEFIFSEMQKMMARFYNKSMTNIFIEMNNDEKVNPLSLISKASTEANQVIKCSSISSGLNRKIAGSINKTKFKQVRDGLISLPTARTETFPISFYKSTANKDEIPISKINLPSEEEADLTITLPFPFFEIKKEKKGQKAYSYFNIIEKSGRSNNKIDLLLSTHRRQRRKGWKEEGGTSAEIRRLMEGEFDKEWEIYLGEAEKSEKAKNDLIKNMTRGKLSKDIKEQLEDIQVKYFSDNNVESWNDLSKEQKQELSKLRKKKVEELKDWKHVKEILKTRAKIGWVELKRGKRQRDRNKWFVNITITRPPFINKELDDTKFGGIDLGVKVPFVCAVHGSPARLIIKENEILQFNKMVSARNRQITKDSEQRKGRGKKNKFIKKEIFNERNELFRKKIIERWANQIVKFFEDQKCATVQIENLESFDRTSYK

SEQ ID NO: 117 - protein, 481 aa, synthetic construct
MKSDTKDKKIIIHQTKTLSLRIVKPQSIPMEEFTDLVRYHQMIIFPVYNNGAIDLYKKLFKAKIQKGNEARAIKYFMNKIVYAPIANTVKNSYIALGYSTKMQSSFSGKRLWDLRFGEATPPTIKADFPLPFYNQSGFKVSSENGEFIIGIPFGQYTKKTVSDIEKKTSFAWDKFTLEDTTKKTLIELLLSTKTRKMNEGWKNNEGTEAEIKRVMDGTYQVTSLEILQRDDSWFVNFNIAYDSLKKQPDRDKIAGIHMGITRPLTAVIYNNKYRALSIYPNTVMHLTQKQLARIKEQRTNSKYATGGHGRNAKVTGTDTLSEAYRQRRKKIIEDWIASIVKFAINNEIGTIYLEDISNTNSFFAAREQKLIYLEDISNTNSFLSTYKYPISAISDTLQHKLEEKAIQVIRKKAYYVNQICSLCGHYNKGFTYQFRRKNKFPKMKCQGCLEATSTEFNAAANVANPDYEKLLIKHGLLQLKK

SEQ ID NO: 118 - protein, 358 aa, synthetic construct
MSTITRQVRLSPTPEQSRLLMAHCQQYISTVNVLVAAFDSEVLTGKVSTKDFRAALPSAVKNQALRDAQSVFKRSVELGCLPVLKKPHCQWNNQNWRVEGDQLILPICKDGKTQQERFRCAAVALEGKAGILRIKKKRGKWIADLTVTQEDAPESSGSAIMGVDLGIKVPAVAHIGGKGTRFFGNGRSQRSMRRRFYARRKTLQKAKKLRAVRKSKGKEARWMKTINHQLSRQIVNHAHALGVGTIKIEALQGIRKGTTRKSRGAAARKNNRMTNTWSFSQLTLFITYKAQRQGITVEQVDPAYTSQDCPACRARNGAQDRTYVCSECGWRGHRDTVGAINISRRAGLSGHRRGATGA

SEQ ID NO: 119 - protein, 507 aa, synthetic construct
MIAQKTIKIKLNPTKEQIIKLNSIIEEYIKVSNFTAKKIAEIQESFTDSGLTQGTCSECGKEKTYRKYHLLKKDNKLFCITCYKRKYSQFTLQKVEFQNKTGLRNVAKLPKTYYTNAIRFASDTFSGFDEIIKKKQNRLNSIQNRLNFWKELLYNPSNRNEIKIKVVKYAPKTDTREHPHYYSEAEIKGRIKRLEKQLKKFKMPKYPEFTSETISLQRELYSWKNPDELKISSITDKNESMNYYGKEYLKRYIDLINSQTPQILLEKENNSFYLCFPITKNIEMPKIDDTFEPVGIDWGITRNIAVVSILDSKTKKPKFVKFYSAGYILGKRKHYKSLRKHFGQKKRQDKINKLGTKEDRFIDSNIHKLAFLIVKEIRNHSNKPIILMENITDNREEAEKSMRQNILLHSVKSRLQNYIAYKALWNNIPTNLVKPEHTSQICNRCGHQDRENRPKGSKLFKCVKCNYMSNADFNASINIARKFYIGEYEPFYKDNEKMKSGVNSISM

SEQ ID NO: 120 - protein, 534 aa, synthetic construct
LKLSEQENITTGVKFKLKLDKETSEGLNDYFDEYGKAINFAIKVIQKELAEDRFAGKVRLDENKKPLLNEDGKKIWDFPNEFCSCGKQVNRYVNGKSLCQECYKNKFTEYGIRKRMYSAKGRKAEQDINIKNSTNKISKTHFNYAIREAFILDKSIKKQRKERFRRLREMKKKLQEFIEIRDGNKILCPKIEKQRVERYIHPSWINKEKKLEDFRGYSMSNVLGKIKILDRNIKREEKSLKEKGQINFKARRLMLDKSVKFLNDNKISFTISKNLPKEYELDLPEKEKRLNWLKEKIKIIKNQKPKYAYLLRKDDNFYLQYTLETEFNLKEDYSGIVGIDRGVSHIAVYTFVHNNGKNERPLFLNSSEILRLKNLQKERDRFLRRKHNKKRKKSNMRNIEKKIQLILHNYSKQIVDFAKNKNAFIVFEKLEKPKKNRSKMSKKSQYKLSQFTFKKLSDLVDYKAKREGIKVLYISPEYTSKECSHCGEKVNTQRPFNGNSSLFKCNKCGVELNADYNASINIAKKGLNILNSTN

SEQ ID NO: 121 - protein, 537 aa, synthetic construct
MEESIITGVKFKLRIDKETTKKLNEYFDEYGKAINFAVKIIQKELADDRFAGKAKLDQNKNPILDENGKKIYEFPDEFCSCGKQVNKYVNNKPFCQECYKIRFTENGIRKRMYSAKGRKAEHKINILNSTNKISKTHFNYAIREAFILDKSIKKQRKKRNERLRESKKRLQQFIDMRDGKREICPTIKGQKVDRFIHPSWITKDKKLEDFRGYTLSIINSKIKILDRNIKREEKSLKEKGQIIFKAKRLMLDKSIRFVGDRKVLFTISKTLPKEYELDLPSKEKRLNWLKEKIEIIKNQKPKYAYLLRKNIESEKKPNYEYYLQYTLEIKPELKDFYDGAIGIDRGINHIAVCTFISNDGKVTPPKFFSSGEILRLKNLQKERDRFLLRKHNKNRKKGNMRVIENKINLILHRYSKQIVDMAKKLNASIVFEELGRIGKSRTKMKKSQRYKLSLFIFKKLSDLVDYKSRREGIRVTYVPPEYTSKECSHCGEKVNTQRPFNGNYSLFKCNKCGIQLNSDYNASINIAKKGLKIPNST

SEQ ID NO: 122 - protein, 540 aa, synthetic construct
LWTIVIGDFIEMPKQDLVTTGIKFKLDVDKETRKKLDDYFDEYGKAINFAVKIIQKNLKEDRFAGKIALGEDKKPLLDKDGKKIYNYPNESCSCGNQVRRYVNAKPFCVDCYKLKFTENGIRKRMYSARGRKADSDINIKNSTNKISKTHFNYAIREGFILDKSLKKQRSKRIKKLLELKRKLQEFIDIRQGQMVLCPKIKNQRVDKFIHPSWLKRDKKLEEFRGYSLSVVEGKIKIFNRNILREEDSLRQRGHVNFKANRIMLDKSVRFLDGGKVNFNLNKGLPKEYLLDLPKKENKLSWLNEKISLIKLQKPKYAYLLRREGSFFIQYTIENVPKTFSDYLGAIGIDRGISHIAVCTFVSKNGVNKAPVFFSSGEILKLKSLQKQRDLFLRGKHNKIRKKSNMRNIDNKINLILHKYSRNIVNLAKSEKAFIVFEKLEKIKKSRFKMSKSLQYKLSQFTFKKLSDLVEYKAKIEGIKVDYVPPEYTSKECSHCGEKVDTQRPFNGNSSLFKCNKCRVQLNADYNASINIAKKSLNISN

SEQ ID NO: 123 - protein, 542 aa, synthetic construct
MSKTTISVKLKIIDLSSEKKEFLDNYFNEYAKATTFCQLRIRRLLRNTHWLGKKEKSSKKWIFESGICDLCGENKELVNEDRNSGEPAKICKRCYNGRYGNQMIRKLFVSTKKREVQENMDIRRVAKLNNTHYHRIPEEAFDMIKAADTAEKRRKKNVEYDKKRQMEFIEMFNDEKKRAARPKKPNERETRYVHISKLESPSKGYTLNGIKRKIDGMGKKIERAEKGLSRKKIFGYQGNRIKLDSNWVRFDLAESEITIPSLFKEMKLRITGPTNVHSKSGQIYFAEWFERINKQPNNYCYLIRKTSSNGKYEYYLQYTYEAEVEANKEYAGCLGVDIGCSKLAAAVYYDSKNKKAQKPIEIFTNPIKKIKMRREKLIKLLSRVKVRHRRRKLMQLSKTEPIIDYTCHKTARKIVEMANTAKAFISMENLETGIKQKQQARETKKQKFYRNMFLFRKLSKLIEYKALLKGIKIVYVKPDYTSQTCSSCGADKEKTERPSQAIFRCLNPTCRYYQRDINADFNAAVNIAKKALNNTEVVTTLL

SEQ ID NO: 124 - protein, 564 aa, synthetic construct
MARAKNQPYQKLTTTTGIKFKLDLSEEEGKRFDEYFSEYAKAVNFCAKVIYQLRKNLKFAGKKELAAKEWKFEISNCDFCNKQKEIYYKNIANGQKVCKGCHRTNFSDNAIRKKMIPVKGRKVESKFNIHNTTKKISGTHRHWAFEDAADIIESMDKQRKEKQKRLRREKRKLSYFFELFGDPAKRYELPKVGKQRVPRYLHKIIDKDSLTKKRGYSLSYIKNKIKISERNIERDEKSLRKASPIAFGARKIKMSKLDPKRAFDLENNVFKIPGKVIKGQYKFFGTNVANEHGKKFYKDRISKILAGKPKYFYLLRKKVAESDGNPIFEYYVQWSIDTETPAITSYDNILGIDAGITNLATTVLIPKNLSAEHCSHCGNNHVKPIFTKFFSGKELKAIKIKSRKQKYFLRGKHNKLVKIKRIRPIEQKVDGYCHVVSKQIVEMAKERNSCIALEKLEKPKKSKFRQRRREKYAVSMFVFKKLATFIKYKAAREGIEIIPVEPEGTSYTCSHCKNAQNNQRPYFKPNSKKSWTSMFKCGKCGIELNSDYNAAFNIAQKALNMTSA

SEQ ID NO: 125 - protein, 610 aa, synthetic construct
MDEKHFFCSYCNKELKISKNLINKISKGSIREDEAVSKAISIHNKKEHSLILGIKFKLFIENKLDKKKLNEYFDNYSKAVTFAARIFDKIRSPYKFIGLKDKNTKKWTFPKAKCVFCLEEKEVAYANEKDNSKICTECYLKEFGENGIRKKIYSTRGRKVEPKYNIFNSTKELSSTHYNYAIRDAFQLLDALKKQRQKKLKSIFNQKLRLKEFEDIFSDPQKRIELSLKPHQREKRYIHLSKSGQESINRGYTLRFVRGKIKSLTRNIEREEKSLRKKTPIHFKGNRLMIFPAGIKFDFASNKVKISISKNLPNEFNFSGTNVKNEHGKSFFKSRIELIKTQKPKYAYVLRKIKREYSKLRNYEIEKIRLENPNADLCDFYLQYTIETESRNNEEINGIIGIDRGITNLACLVLLKKGDKKPSGVKFYKGNKILGMKIAYRKHLYLLKGKRNKLRKQRQIRAIEPKINLILHQISKDIVKIAKEKNFAIALEQLEKPKKARFAQRKKEKYKLALFTFKNLSTLIEYKSKREGIPVIYVPPEKTSQMCSHCAINGDEHVDTQRPYKKPNAQKPSYSLFKCNKCGIELNADYNAAFNIAQKGLKTLMLNHSH

SEQ ID NO: 126 - protein, 369 aa, synthetic construct
MLQTLLVKLDPSKEQYKMLYETMERFNEACNQIAETVFAIHSANKIEVQKTVYYPIREKFGLSAQLTILAIRKVCEAYKRDKSIKPEFRLDGALVYDQRVLSWKGLDKVSLVTLQGRQIIPIKFGDYQKARMDRIRGQADLILVKGVFYLCVVVEVSEESPYDPKGVLGVDLGIKNLAVDSDGEVHSGEQTTNTRERLDSLKARLQSKGTKSAKRHLKKLSGRMAKFSKDVNHCISKKLVAKAKGTLMSIALEDLQGIRDRVTVRKAQRRNLHTWNFGLLRMFVDYKAKIAGVPLVFVDPRNTSRTCPSCGHVAKANRPTRDEFRCVSCGFAGAADHIAAMNIAFRAEVSQPIVTRFFVQSQAPSFRVG

SEQ ID NO: 127 - protein, 552 aa, synthetic construct
MDEEPDSAEPNLAPISVKLKLVKLDGEKLAALNDYFNEYAKAVNFCELKMQKIRKNLVNIRGTYLKEKKAWINQTGECCICKKIDELRCEDKNPDINGKICKKCYNGRYGNQMIRKLFVSTNKRAVPKSLDIRKVARLHNTHYHRIPPEAADIIKAIETAERKRRNRILFDERRYNELKDALENEEKRVARPKKPKEREVRYVPISKKDTPSKGYTMNALVRKVSGMAKKIERAKRNLNKRKKIEYLGRRILLDKNWVRFDFDKSEISIPTMKEFFGEMRFEITGPSNVMSPNGREYFTKWFDRIKAQPDNYCYLLRKESEDETDFYLQYTWRPDAHPKKDYTGCLGIDIGGSKLASAVYFDADKNRAKQPIQIFSNPIGKWKTKRQKVIKVLSKAAVRHKTKKLESLRNIEPRIDVHCHRIARKIVGMALAANAFISMENLEGGIREKQKAKETKKQKFSRNMFVFRKLSKLIEYKALMEGVKVVYIVPDYTSQLCSSCGTNNTKRPKQAIFMCQNTECRYFGKNINADFNAAINIAKKALNRKDIVRELS

SEQ ID NO: 128 - protein, 534 aa, synthetic construct
MEKNNSEQTSITTGIKFKLKLDKETKEKLNNYFDEYGKAINFAVRIIQMQLNDDRLAGKYKRDEKGKPILGEDGKKILEIPNDFCSCGNQVNHYVNGVSFCQECYKKRFSENGIRKRMYSAKGRKAEQDINIKNSTNKISKTHFNYAIREAFNLDKSIKKQREKRFKKLKDMKRKLQEFLEIRDGKRVICPKIEKQKVERYIHPSWINKEKKLEEFRGYSLSIVNSKIKSFDRNIQREEKSLKEKGQINFKAQRLMLDKSVKFLKDNKVSFTISKELPKTFELDLPKKEKKLNWLNEKLEIIKNQKPKYAYLLRKENNIFLQYTLDSIPEIHSEYSGAVGIDRGVSHIAVYTFLDKDGKNERPFFLSSSGILRLKNLQKERDKFLRKKHNKIRKKGNMRNIEQKINLILHEYSKQIVNFAKDKNAFIVFELLEKPKKSRERMSKKIQYKLSQFTFKKLSDLVDYKAKREGIKVIYVEPAYTSKDCSHCGERVNTQRPFNGNFSLFKCNKCGIVLNSDYNASLNIARKGLNISAN

SEQ ID NO: 129 - protein, 577 aa, synthetic construct
MAEEKFFFCEKCNKDIKIPKNYINKQGAEEKARAKHEHRVHALILGIKFKIYPKKEDISKLNDYFDEYAKAVTFTAKIVDKLKAPFLFAGKRDKDTSKKKWVFPVDKCSFCKEKTEINYRTKQGKNICNSCYLTEFGEQGLLEKIYATKGRKVSSSFNLFNSTKKLTGTHNNYVVKESLQLLDALKKQRSKRLKKLSNTRRKLKQFEEMFEKEDKRFQLPLKEKQRELRFIHVSQKDRATEFKGYTMNKIKSKIKVLRRNIEREQRSLNRKSPVFFRGTRIRLSPSVQFDDKDNKIKLTLSKELPKEYSFSGLNVANEHGRKFFAEKLKLIKENKSKYAYLLRRQVNKNNKKPIYDYYLQYTVEFLPNIITNYNGILGIDRGINTLACIVLLENKKEKPSFVKFFSGKGILNLKNKRRKQLYFLKGVHNKYRKQQKIRPIEPRIDQILHDISKQIIDLAKEKRVAISLEQLEKPQKPKFRQSRKAKYKLSQFNFKTLSNYIDYKAKKEGIRVIYIAPEMTSQNCSRCAMKNDLHVNTQRPYKNTSSLFKCNKCGVELNADYNAAFNIAQKGLKILNS

SEQ ID NO: 130 - protein, 613 aa, synthetic construct
MISLKLKLLPDEEQKKLLDEMFWKWASICTRVGFGRADKEDLKPPKDAEGVWFSLTQLNQANTDINDLREAMKHQKHRLEYEKNRLEAQRDDTQDALKNPDRREISTKRKDLFRPKASVEKGFLKLKYHQERYWVRRLKEINKLIERKTKTLIKIEKGRIKFKATRITLHQGSFKIRFGDKPAFLIKALSGKNQIDAPFVVVPEQPICGSVVNSKKYLDEITTNFLAYSVNAMLFGLSRSEEMLLKAKRPEKIKKKEEKLAKKQSAFENKKKELQKLLGRELTQQEEAIIEETRNQFFQDFEVKITKQYSELLSKIANELKQKNDFLKVNKYPILLRKPLKKAKSKKINNLSPSEWKYYLQFGVKPLLKQKSRRKSRNVLGIDRGLKHLLAVTVLEPDKKTFVWNKLYPNPITGWKWRRRKLLRSLKRLKRRIKSQKHETIHENQTRKKLKSLQGRIDDLLHNISRKIVETAKEYDAVIVVEDLQSMRQHGRSKGNRLKTLNYALSLFDYANVMQLIKYKAGIEGIQIYDVKPAGTSQNCAYCLLAQRDSHEYKRSQENSKIGVCLNPNCQNHKKQIDADLNAARVIASCYALKINDSQPFGTRKRFKKRTTN

SEQ ID NO: 131 - protein, 615 aa, synthetic construct
METLSLKLKLNPSKEQLLVLDKMFWKWASICTRLGLKKAEMSDLEPPKDAEGVWFSKTQLNQANTDVNDLRKAMQHQGKRIEYELDKVENRRNEIQEMLEKPDRRDISPNRKDLFRPKAAVEKGYLKLKYHKLGYWSKELKTANKLIERKRKTLAKIDAGKMKFKPTRISLHTNSFRIKFGEEPKIALSTTSKHEKIELPLITSLQRPLKTSCAKKSKTYLDAAILNFLAYSTNAALFGLSRSEEMLLKAKKPEKIEKRDRKLATKRESFDKKLKTLEKLLERKLSEKEKSVFKRKQTEFFDKFCITLDETYVEALHRIAEELVSKNKYLEIKKYPVLLRKPESRLRSKKLKNLKPEDWTYYIQFGFQPLLDTPKPIKTKTVLGIDRGVRHLLAVSIFDPRTKTFTFNRLYSNPIVDWKWRRRKLLRSIKRLKRRLKSEKHVHLHENQFKAKLRSLEGRIEDHFHNLSKEIVDLAKENNSVIVVENLGGMRQHGRGRGKWLKALNYALSHFDYAKVMQLIKYKAELAGVFVYDVAPAGTSINCAYCLLNDKDASNYTRGKVINGKKNTKIGECKTCKKEFDADLNAARVIALCYEKRLNDPQPFGTRKQFKPKKP

SEQ ID NO: 132 - protein, 775 aa, synthetic construct
MKALKLQLIPTRKQYKILDEMFWKWASLANRVSQKGESKETLAPKKDIQKIQFNATQLNQIEKDIKDLRGAMKEQQKQKERLLLQIQERRSTISEMLNDDNNKERDPHRPLNFRPKGWRKFHTSKHWVGELSKILRQEDRVKKTIERIVAGKISFKPKRIGIWSSNYKINFFKRKISINPLNSKGFELTLMTEPTQDLIGKNGGKSVLNNKRYLDDSIKSLLMFALHSRFFGLNNTDTYLLGGKINPSLVKYYKKNQDMGEFGREIVEKFERKLKQEINEQQKKIIMSQIKEQYSNRDSAFNKDYLGLINEFSEVFNQRKSERAEYLLDSFEDKIKQIKQEIGESLNISDWDFLIDEAKKAYGYEEGFTEYVYSKRYLEILNKIVKAVLITDIYFDLRKYPILLRKPLDKIKKISNLKPDEWSYYIQFGYDSINPVQLMSTDKFLGIDRGLTHLLAYSVFDKEKKEFIINQLEPNPIMGWKWKLRKVKRSLQHLERRIRAQKMVKLPENQMKKKLKSIEPKIEVHYHNISRKIVNLAKDYNASIVVESLEGGGLKQHGRKKNARNRSLNYALSLFDYGKIASLIKYKADLEGVPMYEVLPAYTSQQCAKCVLEKGSFVDPEIIGYVEDIGIKGSLLDSLFEGTELSSIQVLKKIKNKIELSARDNHNKEINLILKYNFKGLVIVRGQDKEEIAEHPIKEINGKFAILDFVYKRGKEKVGKKGNQKVRYTGNKKVGYCSKHGQVDADLNASRVIALCKYLDINDPILFGEQRKSFK

SEQ ID NO: 133 - protein, 777 aa, synthetic construct
MVTRAIKLKLDPTKNQYKLLNEMFWKWASLANRFSQKGASKETLAPKDGTQKIQFNATQLNQIKKDVDDLRGAMEKQGKQKERLLIQIQERLLTISEILRDDSKKEKDPHRPQNFRPFGWRRFHTSAYWSSEASKLTRQVDRVRRTIERIKAGKINFKPKRIGLWSSTYKINFLKKKINISPLKSKSFELDLITEPQQKIIGKEGGKSVANSKKYLDDSIKSLLIFAIKSRLFGLNNKDKPLFENIITPNLVRYHKKGQEQENFKKEVIKKFENKLKKEISQKQKEIIFSQIERQYENRDATFSEDYLRAISEFSEIFNQRKKERAKELLNSFNEKIRQLKKEVNGNISEEDLKILEVEAEKAYNYENGFIEWEYSEQFLGVLEKIARAVLISDNYFDLKKYPILIRKPTNKSKKITNLKPEEWDYYIQFGYGLINSPMKIETKNFMGIDRGLTHLLAYSIFDRDSEKFTINQLELNPIKGWKWKLRKVKRSLQHLERRMRAQKGVKLPENQMKKRLKSIEPKIESYYHNLSRKIVNLAKANNASIVVESLEGGGLKQHGRKKNSRHRALNYALSLFDYGKIASLIKYKSDLEGVPMYEVLPAYTSQQCAKCVLKKGSFVEPEIIGYIEEIGFKENLLTLLFEDTGLSSVQVLKKSKNKMTLSARDKEGKMVDLVLKYNFKGLVISQEKKKEEIVEFPIKEIDGKFAVLDSAYKRGKERISKKGNQKLVYTGNKKVGYCSVHGQVDADLNASRVIALCKYLGINEPIVFGEQRKSFK

SEQ ID NO: 134 - protein, 610 aa, synthetic construct
LDLITEPIQPHKSSSLRSKEFLEYQISDFLNFSLHSLFFGLASNEGPLVDFKIYDKIVIPKPEERFPKKESEEGKKLDSFDKRVEEYYSDKLEKKIERKLNTEEKNVIDREKTRIWGEVNKLEEIRSIIDEINEIKKQKHISEKSKLLGEKWKKVNNIQETLLSQEYVSLISNLSDELTNKKKELLAKKYSKFDDKIKKIKEDYGLEFDENTIKKEGEKAFLNPDKFSKYQFSSSYLKLIGEIARSLITYKGFLDLNKYPIIFRKPINKVKKIHNLEPDEWKYYIQFGYEQINNPKLETENILGIDRGLTHILAYSVFEPRSSKFILNKLEPNPIEGWKWKLRKLRRSIQNLERRWRAQDNVKLPENQMKKNLRSIEDKVENLYHNLSRKIVDLAKEKNACIVFEKLEGQGMKQHGRKKSDRLRGLNYKLSLFDYGKIAKLIKYKAEIEGIPIYRIDSAYTSQNCAKCVLESRRFAQPEEISCLDDFKEGDNLDKRILEGTGLVEAKIYKKLLKEKKEDFEIEEDIAMFDTKKVIKENKEKTVILDYVYTRRKEIIGTNHKKNIKGIAKYTGNTKIGYCMKHGQVDADLNASRTIALCKNFDINNPEIWK

SEQ ID NO: 135 - protein, 632 aa, synthetic construct
MSDESLVSSEDKLAIKIKIVPNAEQAKMLDEMFKKWSSICNRISRGKEDIETLRPDEGKELQFNSTQLNSATMDVSDLKKAMARQGERLEAEVSKLRGRYETIDASLRDPSRRHTNPQKPSSFYPSDWDISGRLTPRFHTARHYSTELRKLKAKEDKMLKTINKIKNGKIVFKPKRITLWPSSVNMAFKGSRLLLKPFANGFEMELPIVISPQKTADGKSQKASAEYMRNALLGLAGYSINQLLFGMNRSQKMLANAKKPEKVEKFLEQMKNKDANFDKKIKALEGKWLLDRKLKESEKSSIAVVRTKFFKSGKVELNEDYLKLLKHMANEILERDGFVNLNKYPILSRKPMKRYKQKNIDNLKPNMWKYYIQFGYEPIFERKASGKPKNIMGIDRGLTHLLAVAVFSPDQQKFLFNHLESNPIMHWKWKLRKIRRSIQHMERRIRAEKNKHIHEAQLKKRLGSIEEKTEQHYHIVSSKIINWAIEYEAAIVLESLSHMKQRGGKKSVRTRALNYALSLFDYEKVARLITYKARIRGIPVYDVLPGMTSKTCATCLLNGSQGAYVRGLETTKAAGKATKRKNMKIGKCMVCNSSENSMIDADLNAARVIAICKYKNLNDPQPAGSRKVFKRF

SEQ ID NO: 136 - protein, 625 aa, synthetic construct
MLALKLKIMPTEKQAEILDAMFWKWASICSRIAKMKKKVSVKENKKELSKKIPSNSDIWFSKTQLCQAEVDVGDHKKALKNFEKRQESLLDELKYKVKAINEVINDESKREIDPNNPSKFRIKDSTKKGNLNSPKFFTLKKWQKILQENEKRIKKKESTIEKLKRGNIFFNPTKISLHEEEYSINFGSSKLLLNCFYKYNKKSGINSDQLENKFNEFQNGLNIICSPLQPIRGSSKRSFEFIRNSIINFLMYSLYAKLFGIPRSVKALMKSNKDENKLKLEEKLKKKKSSFNKTVKEFEKMIGRKLSDNESKILNDESKKFFEIIKSNNKYIPSEEYLKLLKDISEEIYNSNIDFKPYKYSILIRKPLSKFKSKKLYNLKPTDYKYYLQLSYEPFSKQLIATKTILGIDRGLKHLLAVSVFDPSQNKFVYNKLIKNPVFKWKKRYHDLKRSIRNRERRIRALTGVHIHENQLIKKLKSMKNKINVLYHNVSKNIVDLAKKYESTIVLERLENLKQHGRSKGKRYKKLNYVLSNFDYKKIESLISYKAKKEGVPVSNINPKYTSKTCAKCLLEVNQLSELKNEYNRDSKNSKIGICNIHGQIDADLNAARVIALCYSKNLNEPHFK

SEQ ID NO: 137 - protein, 517 aa, synthetic construct
VINLFGYKFALYPNKTQEELLNKHLGECGWLYNKAIEQNEYYKADSNIEEAQKKFELLPDKNSDEAKVLRGNISKDNYVYRTLVKKKKSEINVQIRKAVVLRPAETIRNLAKVKKKGLSVGRLKFIPIREWDVLPFKQSDQIRLEENYLILEPYGRLKFKMHRPLLGKPKTFCIKRTATDRWTISFSTEYDDSNMRKNDGGQVGIDVGLKTHLRLSNENPDEDPRYPNPKIWKRYDRRLTILQRRISKSKKLGKNRTRLRLRLSRLWEKIRNSRADLIQNETYEILSENKLIAIEDLNVKGMQEKKDKKGRKGRTRAQEKGLHRSISDAAFSEFRRVLEYKAKRFGSEVKPVSAIDSSKECHNCGNKKGMPLESRIYECPKCGLKIDRDLNSAKVILARATGVRPGSNARADTKISATAGASVQTEGTVSEDFRQQMETSDQKPMQGEGSKEPPMNPEHKSSGRGSKHVNIGCKNKVGLYNEDENSRSTEKQIMDENRSTTEDMVEIGALHSPVLTT

SEQ ID NO: 138 - protein, 410 aa, synthetic construct
MIASIDYEAVSQALIVFEFKAKGKDSQYQAIDEAIRSYRFIRNSCLRYWMDNKKVGKYDLNKYCKVLAKQYPFANKLNSQARQSAAECSWSAISRFYDNCKRKVSGKKGFPKFKKHARSVEYKTSGWKLSENRKAITFTDKNGIGKLKLKGTYDLHFSQLEDMKRVRLVRRADGYYVQFCISVDVKVETEPTGKAIGLDVGIKYFLADSSGNTIENPQFYRKAEKKLNRANRRKSKKYIRGVKPQSKNYHKARCRYARKHLRVSRQRKEYCKRVAYCVIHSNDVVAYEDLNVKGMVKNRHLAKSISDVAWSTFRHWLEYFAIKYGKLTIPVAPHNTSQNCSNCDKKVPKSLSTRTHICHHCGYSEDRDVNAAKNILKKALSTVGQTGSLKLGEIEPLLVLEQSCTRKFDL

SEQ ID NO: 139 - protein, 486 aa, synthetic construct
LAEENTLHLTLAMSLPLNDLPENRTRSELWRRQWLPQKKLSLLLGVNQSVRKAAADCLRWFEPYQELLWWEPTDPDGKKLLDKEGRPIKRTAGHMRVLRKLEEIAPFRGYQLGSAVKNGLRHKVADLLLSYAKRKLDPQFTDKTSYPSIGDQFPIVWTGAFVCYEQSITGQLYLYLPLFPRGSHQEDITNNYDPDRGPALQVFGEKEIARLSRSTSGLLLPLQFDKWGEATFIRGENNPPTWKATHRRSDKKWLSEVLLREKDFQPKRVELLVRNGRIFVNVACEIPTKPLLEVENFMGVSFGLEHLVTVVVINRDGNVVHQRQEPARRYEKTYFARLERLRRRGGPFSQELETFHYRQVAQIVEEALRFKSVPAVEQVGNIPKGRYNPRLNLRLSYWPFGKLADLTSYKAVKEGLPKPYSVYSATAKMLCSTCGAANKEGDQPISLKGPTVYCGNCGTRHNTGFNTALNLARRAQELFVKGVVAR

SEQ ID NO: 140 - protein, 602 aa, synthetic construct
MSQSLLKWHDMAGRDKDASRSLQKSAVEGVLLHLTASHRVALEMLEKSVSQTVAVTMEAAQQRLVIVLEDDPTKATSRKRVISADLQFTREEFGSLPNWAQKLASTCPEIATKYADKHINSIRIAWGVAKESTNGDAVEQKLQWQIRLLDVTMFLQQLVLQLADKALLEQIPSSIRGGIGQEVAQQVTSHIQLLDSGTVLKAELPTISDRNSELARKQWEDAIQTVCTYALPFSRERARILDPGKYAAEDPRGDRLINIDPMWARVLKGPTVKSLPLLFVSGSSIRIVKLTLPRKHAAGHKHTFTATYLVLPVSREWINSLPGTVQEKVQWWKKPDVLATQELLVGKGALKKSANTLVIPISAGKKRFFNHILPALQRGFPLQWQRIVGRSYRRPATHRKWFAQLTIGYTNPSSLPEMALGIHFGMKDILWWALADKQGNILKDGSIPGNSILDFSLQEKGKIERQQKAGKNVAGKKYGKSLLNATYRVVNGVLEFSKGISAEHASQPIGLGLETIRFVDKASGSSPVNARHSNWNYGQLSGIFANKAGPAGFSVTEITLKKAQRDLSDAEQARVLAIEATKRFASRIKRLATKRKDDTLFV

SEQ ID NO: 141 - protein, 494 aa, synthetic construct
VEPVEKERFYYRTYTFRLDGQPRTQNLTTQSGWGLLTKAVLDNTKHYWEIVHHARIANQPIVFENPVIDEQGNPKLNKLGQPRFWKRPISDIVNQLRALFENQNPYQLGSSLIQGTYWDVAENLASWYALNKEYLAGTATWGEPSFPEPHPLTEINQWMPLTFSSGKVVRLLKNASGRYFIGLPILGENNPCYRMRTIEKLIPCDGKGRVTSGSLILFPLVGIYAQQHRRMTDICESIRTEKGKLAWAQVSIDYVREVDKRRRMRRTRKSQGWIQGPWQEVFILRLVLAHKAPKLYKPRCFAGISLGPKTLASCVILDQDERVVEKQQWSGSELLSLIHQGEERLRSLREQSKPTWNAAYRKQLKSLINTQVFTIVTFLRERGAAVRLESIARVRKSTPAPPVNFLLSHWAYRQITERLKDLAIRNGMPLTHSNGSYGVRFTCSQCGATNQGIKDPTKYKVDIESETFLCSICSHREIAAVNTATNLAKQLLDE

SEQ ID NO: 142 - protein, 526 aa, synthetic construct
MNDTETSETLTSHRTVCAHLHVVGETGSLPRLVEAALAELITLNGRATQALLSLAKNGLVLRRDKEENLIAAELTLPCRKNKYADVAAKAGEPILATRINNKGKLVTKKWYGEGNSYHIVRFTPETGMFTVRVFDRYAFDEELLHLHSEVVFGSDLPKGIKAKTDSLPANFLQAVFTSFLELPFQGFPDIVVKPAMKQAAEQLLSYVQLEAGENQQAEYPDTNERDPELRLVEWQKSLHELSVRTEPFEFVRARDIDYYAETDRRGNRFVNITPEWTKFAESPFARRLPLKIPPEFCILLRRKTEGHAKIPNRIYLGLQIFDGVTPDSTLGVLATAEDGKLFWWHDHLDEFSNLEGKPEPKLKNKPQLLMVSLEYDREQRFEESVGGDRKICLVTLKETRNFRRGWNGRILGIHFQHNPVITWALMDHDAEVLEKGFIEGNAFLGKALDKQALNEYLQKGGKWVGDRSFGNKLKGITHTLASLIVRLAREKDAWIALEEISWVQKQSADSVANHEIVEQPHHSLTR

SEQ ID NO: 143 - protein, 649 aa, synthetic construct
MNDTETSETLTSHRTVCAHLHVVGETGSLPRLVEAALAELITLNGRATQALLSLAKNGLVLRRDKEENLIAAELTLPCRKNKYADVAAKAGEPILATRINNKGKLVTKKWYGEGNSYHIVRFTPETGMFTVRVFDRYAFDEELLHLHSEVVFGSDLPKGIKAKTDSLPANFLQAVFTSFLELPFQGFPDIVVKPAMKQAAEQLLSYVQLEAGENQQAEYPDTNERDPELRLVEWQKSLHELSVRTEPFEFVRARDIDYYAETDRRGNRFVNITPEWTKFAESPFARRLPLKIPPEFCILLRRKTEGHAKIPNRIYLGLQIFDGVTPDSTLGVLATAEDGKLFWWHDHLDEFSNLEGKPEPKLKNKPQLLMVSLEYDREQRFEESVGGDRKICLVTLKETRNFRRGRHGHTRTDRLPAGNTLWRADFATSAEVAAPKWNGRILGIHFQHNPVITWALMDHDAEVLEKGFIEGNAFLGKALDKQALNEYLQKGGKWVGDRSFGNKLKGITHTLASLIVRLAREKDAWIALEEISWVQKQSADSVANRRFSMWNYSRLATLIEWLGTDIATRDCGTAAPLAHKVSDYLTHFTCPECGACRKAGQKKEIADTVRAGDILTCRKCGFSGPIPDNFIAEFVAKKALERMLKKKPV

SEQ ID NO: 144 - protein, 414 aa, synthetic construct
MAKRNFGEKSEALYRAVRFEVRPSKEELSILLAVSEVLRMLFNSALAERQQVFTEFIASLYAELKSASVPEEISEIRKKLREAYKEHSISLFDQINALTARRVEDEAFASVTRNWQEETLDALDGAYKSFLSLRRKGDYDAHSPRSRDSGFFQKIPGRSGFKIGEGRIALSCGAGRKLSFPIPDYQQGRLAETTKLKKFELYRDQPNLAKSGRFWISVVYELPKPEATTCQSEQVAFVALGASSIGVVSQRGEEVIALWRSDKHWVPKIEAVEERMKRRVKGSRGWLRLLNSGKRRMHMISSRQHVQDEREIVDYLVRNHGSHFVVTELVVRSKEGKLADSSKPERGGSLGLNWAAQNTGSLSRLVRQLEEKVKEHGGSVRKHKLTLTEAPPARGAENKLWMARKLRESFLKEV

SEQ ID NO: 145 - protein, 413 aa, synthetic construct
LAKNDEKELLYQSVKFEIYPDESKIRVLTRVSNILVLVWNSALGERRARFELYIAPLYEELKKFPRKSAESNALRQKIREGYKEHIPTFFDQLKKLLTPMRKEDPALLGSVPRAYQEETLNTLNGSFVSFMTLRRNNDMDAKPPKGRAEDRFHEISGRSGFKIDGSEFVLSTKEQKLRFPIPNYQLEKLKEAKQIKKFTLYQSRDRRFWISIAYEIELPDQRPFNPEEVIYIAFGASSIGVISPEGEKVIDFWRPDKHWKPKIKEVENRMRSCKKGSRAWKKRAAARRKMYAMTQRQQKLNHREIVASLLRLGFHFVVTEYTVRSKPGKLADGSNPKRGGAPQGFNWSAQNTGSFGEFILWLKQKVKEQGGTVQTFRLVLGQSERPEKRGRDNKIEMVRLLREKYLESQTIVV

SEQ ID NO: 146 - protein, 449 aa, synthetic construct
MAKGKKKEGKPLYRAVRFEIFPTSDQITLFLRVSKNLQQVWNEAWQERQSCYEQFFGSIYERIGQAKKRAQEAGFSEVWENEAKKGLNKKLRQQEISMQLVSEKESLLQELSIAFQEHGVTLYDQINGLTARRIIGEFALIPRNWQEETLDSLDGSFKSFLALRKNGDPDAKPPRQRVSENSFYKIPGRSGFKVSNGQIYLSFGKIGQTLTSVIPEFQLKRLETAIKLKKFELCRDERDMAKPGRFWISVAYEIPKPEKVPVVSKQITYLAIGASRLGVVSPKGEFCLNLPRSDYHWKPQINALQERLEGVVKGSRKWKKRMAACTRMFAKLGHQQKQHGQYEVVKKLLRHGVHFVVTELKVRSKPGALADASKSDRKGSPTGPNWSAQNTGNIARLIQKLTDKASEHGGTVIKRNPPLLSLEERQLPDAQRKIFIAKKLREEFLADQK

SEQ ID NO: 147 - protein, 711 aa, synthetic construct
MAKREKKDDVVLRGTKMRIYPTDRQVTLMDMWRRRCISLWNLLLNLETAAYGAKNTRSKLGWRSIWARVVEENHAKALIVYQHGKCKKDGSFVLKRDGTVKHPPRERFPGDRKILLGLFDALRHTLDKGAKCKCNVNQPYALTRAWLDETGHGARTADIIAWLKDFKGECDCTAISTAAKYCPAPPTAELLTKIKRAAPADDLPVDQAILLDLFGALRGGLKQKECDHTHARTVAYFEKHELAGRAEDILAWLIAHGGTCDCKIVEEAANHCPGPRLFIWEHELAMIMARLKAEPRTEWIGDLPSHAAQTVVKDLVKALQTMLKERAKAAAGDESARKTGFPKFKKQAYAAGSVYFPNTTMFFDVAAGRVQLPNGCGSMRCEIPRQLVAELLERNLKPGLVIGAQLGLLGGRIWRQGDRWYLSCQWERPQPTLLPKTGRTAGVKIAASIVFTTYDNRGQTKEYPMPPADKKLTAVHLVAGKQNSRALEAQKEKEKKLKARKERLRLGKLEKGHDPNALKPLKRPRVRRSKLFYKSAARLAACEAIERDRRDGFLHRVTNEIVHKFDAVSVQKMSVAPMMRRQKQKEKQIESKKNEAKKEDNGAAKKPRNLKPVRKLLRHVAMARGRQFLEYKYNDLRGPGSVLIADRLEPEVQECSRCGTKNPQMKDGRRLLRCIGVLPDGTDCDAVLPRNRNAARNAEKRLRKHREAHNA

SEQ ID NO: 148 - protein, 574 aa, synthetic construct
MNEVLPIPAVGEDAADTIMRGSKMRIYPSVRQAATMDLWRRRCIQLWNLLLELEQAAYSGENRRTQIGWRSIWATVVEDSHAEAVRVAREGKKRKDGTFRKAPSGKEIPPLDPAMLAKIQRQMNGAVDVDPKTGEVTPAQPRLFMWEHELQKIMARLKQAPRTHWIDDLPSHAAQSVVKDLIKALQAMLRERKKRASGIGGRDTGFPKFKKNRYAAGSVYFANTQLRFEAKRGKAGDPDAVRGEFARVKLPNGVGWMECRMPRHINAAHAYAQATLMGGRIWRQGENWYLSCQWKMPKPAPLPRAGRTAAIKIAAAIPITTVDNRGQTREYAMPPIDRERIAAHAAAGRAQSRALEARKRRAKKREAYAKKRHAKKLERGIAAKPPGRARIKLSPGFYAAAAKLAKLEAEDANAREAWLHEITTQIVRNFDVIAVPRMEVAKLMKKPEPPEEKEEQVKAPWQGKRRSLKAARVMMRRTAMALIQTTLKYKAVDLRGPQAYEEIAPLDVTAAACSGCGVLKPEWKMARAKGREIMRCQEPLPGGKTCNTVLTYTRNSARVIGRELAVRLAERQKA

SEQ ID NO: 149 - protein, 400 aa, synthetic construct
MTTQKTYNFCFYDQRFFELSKEAGEVYSRSLEEFWKIYDETGVWLSKFDLQKHMRNKLERKLLHSDSFLGAMQQVHANLASWKQAKKVVPDACPPRKPKFLQAILFKKSQIKYKNGFLRLTLGTEKEFLYLKWDINIPLPIYGSVTYSKTRGWKINLCLETEVEQKNLSENKYLSIDLGVKRVATIFDGENTITLSGKKFMGLMHYRNKLNGKTQSRLSHKKKGSNNYKKIQRAKRKTTDRLLNIQKEMLHKYSSFIVNYAIRNDIGNIIIGDNSSTHDSPNMRGKTNQKISQNPEQKLKNYIKYKFESISGRVDIVPEPYTSRKCPHCKNIKKSSPKGRTYKCKKCGFIFDRDGVGAINIYNENVSFGQIISPGRIRSLTEPIGMKFHNEIYFKSYVAA

SEQ ID NO: 150 - protein, 743 aa, synthetic construct
MSVRSFQARVECDKQTMEHLWRTHKVFNERLPEIIKILFKMKRGECGQNDKQKSLYKSISQSILEANAQNADYLLNSVSIKGWKPGTAKKYRNASFTWADDAAKLSSQGIHVYDKKQVLGDLPGMMSQMVCRQSVEAISGHIELTKKWEKEHNEWLKEKEKWESEDEHKKYLDLREKFEQFEQSIGGKITKRRGRWHLYLKWLSDNPDFAAWRGNKAVINPLSEKAQIRINKAKPNKKNSVERDEFFKANPEMKALDNLHGYYERNFVRRRKTKKNPDGFDHKPTFTLPHPTIHPRWFVFNKPKTNPEGYRKLILPKKAGDLGSLEMRLLTGEKNKGNYPDDWISVKFKADPRLSLIRPVKGRRVVRKGKEQGQTKETDSYEFFDKHLKKWRPAKLSGVKLIFPDKTPKAAYLYFTCDIPDEPLTETAKKIQWLETGDVTKKGKKRKKKVLPHGLVSCAVDLSMRRGTTGFATLCRYENGKIHILRSRNLWVGYKEGKGCHPYRWTEGPDLGHIAKHKREIRILRSKRGKPVKGEESHIDLQKHIDYMGEDRFKKAARTIVNFALNTENAASKNGFYPRADVLLLENLEGLIPDAEKERGINRALAGWNRRHLVERVIEMAKDAGFKRRVFEIPPYGTSQVCSKCGALGRRYSIIRENNRREIRFGYVEKLFACPNCGYCANADHNASVNLNRRFLIEDSFKSYYDWKRLSEKKQKEEIETIESKLMDKLCAMHKISRGSISK

SEQ ID NO: 151 - protein, 769 aa, synthetic construct
MHLWRTHCVFNQRLPALLKRLFAMRRGEVGGNEAQRQVYQRVAQFVLARDAKDSVDLLNAVSLRKRSANSAFKKKATISCNGQAREVTGEEVFAEAVALASKGVFAYDKDDMRAGLPDSLFQPLTRDAVACMRSHEELVATWKKEYREWRDRKSEWEAEPEHALYLNLRPKFEEGEAARGGRFRKRAERDHAYLDWLEANPQLAAWRRKAPPAVVPIDEAGKRRIARAKAWKQASVRAEEFWKRNPELHALHKIHVQYLREFVRPRRTRRNKRREGFKQRPTFTMPDPVRHPRWCLFNAPQTSPQGYRLLRLPQSRRTVGSVELRLLTGPSDGAGFPDAWVNVRFKADPRLAQLRPVKVPRTVTRGKNKGAKVEADGFRYYDDQLLIERDAQVSGVKLLFRDIRMAPFADKPIEDRLLSATPYLVFAVEIKDEARTERAKAIRFDETSELTKSGKKRKTLPAGLVSVAVDLDTRGVGFLTRAVIGVPEIQQTHHGVRLLQSRYVAVGQVEARASGEAEWSPGPDLAHIARHKREIRRLRQLRGKPVKGERSHVRLQAHIDRMGEDRFKKAARKIVNEALRGSNPAAGDPYTRADVLLYESLETLLPDAERERGINRALLRWNRAKLIEHLKRMCDDAGIRHFPVSPFGTSQVCSKCGALGRRYSLARENGRAVIRFGWVERLFACPNPECPGRRPDRPDRPFTCNSDHNASVNLHRVFALGDQAVAAFRALAPRDSPARTLAVKRVEDTLRPQLMRVHKLADAGVDSPF

SEQ ID NO: 152 - protein, 666 aa, synthetic construct
MATLVYRYGVRAHGSARQQDAVVSDPAMLEQLRLGHELRNALVGVQHRYEDGKRAVWSGFASVAAADHRVTTGETAVAELEKQARAEHSADRTAATRQGTAESLKAARAAVKQARADRKAAMAAVAEQAKPKIQALGDDRDAEIKDLYRRFCQDGVLLPRCGRCAGDLRSDGDCTDCGAAHEPRKLYWATYNAIREDHQTAVKLVEAKRKAGQPARLRFRRWTGDGTLTVQLQRMHGPACRCVTCAEKLTRRARKTDPQAPAVAADPAYPPTDPPRDPALLASGQGKWRNVLQLGTWIPPGEWSAMSRAERRRVGRSHIGWQLGGGRQLTLPVQLHRQMPADADVAMAQLTRVRVGGRHRMSVALTAKLPDPPQVQGLPPVALHLGWRQRPDGSLRVATWACPQPLDLPPAVADVVVSHGGRWGEVIMPARWLADAEVPPRLLGRRDKAMEPVLEALADWLEAHTEACTARMTPALVRRWRSQGRLAGLTNRWRGQPPTGSAEILTYLEAWRIQDKLLWERESHLRRRLAARRDDAWRRVASWLARHAGVLVVDDADIAELRRRDDPADTDPTMPASAAQAARARAALAAPGRLRHLATITATRDGLGVHTVASAGLTRLHRKCGHQAQPDPRYAASAVVTCPGCGNGYDQDYNAAMLMLDRQQQP

SEQ ID NO: 153 - protein, 564 aa, synthetic construct
MSRVELHRAYKFRLYPTPAQVAELAEWERQLRRLYNLAHSQRLAAMQRHVRPKSPGVLKSECLSCGAVAVAEIGTDGKAKKTVKHAVGCSVLECRSCGGSPDAEGRTAHTAACSFVDYYRQGREMTQLLEEDDQLARVVCSARQETLRDLEKAWQRWHKMPGFGKPHFKKRIDSCRIYFSTPKSWAVDLGYLSFTGVASSVGRIKIRQDRVWPGDAKFSSCHVVRDVDEWYAVFPLTFTKEIEKPKGGAVGINRGAVHAIADSTGRVVDSPKFYARSLGVIRHRARLLDRKVPFGRAVKPSPTKYHGLPKADIDAAAARVNASPGRLVYEARARGSIAAAEAHLAALVLPAPRQTSQLPSEGRNRERARRFLALAHQRVRRQREWFLHNESAHYAQSYTKIAIEDWSTKEMTSSEPRDAEEMKRVTRARNRSILDVGWYELGRQIAYKSEATGAEFAKVDPGLRETETHVPEAIVRERDVDVSGMLRGEAGISGTCSRCGGLLRASASGHADAECEVCLHVEVGDVNAAVNVLKRAMFPGAAPPSKEKAKVTIGIKGRKKKRAA

SEQ ID NO: 154 - protein, 565 aa, synthetic construct
MSRVELHRAYKFRLYPTPVQVAELSEWERQLRRLYNLGHEQRLLTLTRHLRPKSPGVLKGECLSCDSTQVQEVGADGRPKTTVRHAEQCPTLACRSCGALRDAEGRTAHTVACAFVDYYRQGREMTELLAADDQLARVVCSARQEVLRDLDKAWQRWRKMPGFGKPRFKRRTDSCRIYFSTPKAWKLEGGHLSFTGAATTVGAIKMRQDRNWPASVQFSSCHVVRDVDEWYAVFPLTFVAEVARPKGGAVGINRGAVHAIADSTGRVVDSPRYYARALGVIRHRARLFDRKVPSGHAVKPSPTKYRGLSAIEVDRVARATGFTPGRVVTEALNRGGVAYAECALAAIAVLGHGPERPLTSDGRNREKARKFLALAHQRVRRQREWFLHNESAHYARTYSKIAIEDWSTKEMTASEPQGEETRRVTRSRNRSILDVGWYELGRQLAYKTEATGAEFAQVDPGLKETETNVPKAIADARDVDVSGMLRGEAGISGTCSKCGGLLRAPASGHADAECEICLNVEVGDVNAAVNVLKRAMFPGDAPPASGEKPKVSIGIKGRQKKKKAA

SEQ ID NO: 155 - protein, 499 aa, synthetic construct
MEAIATGMSPERRVELGILPGSVELKRAYKFRLYPMKVQQAELSEWERQLRRLYNLAHEQRLAALLRYRDWDFQKGACPSCRVAVPGVHTAACDHVDYFRQAREMTQLLEVDAQLSRVICCARQEVLRDLDKAWQRWRKKLGGRPRFKRRTDSCRIYLSTPKHWEIAGRYLRLSGLASSVGEIRIEQDRAFPEGALLSSCSIVRDVDEWYACLPLTFTQPIERAPHRSVGLNRGVVHALADSDGRVVDSPKFFERALATVQKRSRDLARKVSGSRNAHKARIKLAKAHQRVRRQRAAFLHQESAYYSKGFDLVALEDMSVRKMTATAGEAPEMGRGAQRDLNRGILDVGWYELARQIDYKRLAHGGELLRVDPGQTTPLACVTEEQPARGISSACAVCGIPLARPASGNARMRCTACGSSQVGDVNAAENVLTRALSSAPSGPKSPKASIKIKGRQKRLGTPANRAGEASGGDPPVRGPVEGGTLAYVVEPVSESQSDT

SEQ ID NO: 156 - protein, 560 aa, synthetic construct
MTVRTYKYRAYPTPEQAEALTSWLRFASQLYNAALEHRKNAWGRHDAHGRGFRFWDGDAAPRKKSDPPGRWVYRGGGGAHISKNDQGKLLTEFRREHAELLPPGMPALVQHEVLARLERSMAAFFQRATKGQKAGYPRWRSEHRYDSLTFGLTSPSKERFDPETGESLGRGKTVGAGTYHNGDLRLTGLGELRILEHRRIPMGAIPKSVIVRRSGKRWFVSIAMEMPSVEPAASGRPAVGLDMGVVTWGTAFTADTSAAAALVADLRRMATDPSDCRRLEELEREAAQLSEVLAHCRARGLDPARPRRCPKELTKLYRRSLHRLGELDRACARIRRRLQAAHDIAEPVPDEAGSAVLIEGSNAGMRHARRVARTQRRVARRTRAGHAHSNRRKKAVQAYARAKERERSARGDHRHKVSRALVRQFEEISVEALDIKQLTVAPEHNPDPQPDLPAHVQRRRNRGELDAAWGAFFAALDYKAADAGGRVARKPAPHTTQECARCGTLVPKPISLRVHRCPACGYTAPRTVNSARNVLQRPLEEPGRAGPSGANGRGVPHAVA

SEQ ID NO: 157 - protein, 404 aa, synthetic construct
MNCRYRYRIYPTPGQRQSLARLFGCVRVVWNDALFLCRQSEKLPKNSELQKLCITQAKKTEARGWLGQVSAIPLQQSVADLGVAFKNFFQSRSGKRKGKKVNPPRVKRRNNRQGARFTRGGFKVKTSKVYLARIGDIKIKWSRPLPSEPSSVTVIKDCAGQYFLSFVVEVKPEIKPPKNPSIGIDLGLKTFASCSNGEKIDSPDYSRLYRKLKRCQRRLAKRQRGSKRRERMRVKVAKLNAQIRDKRKDFLHKLSTKVVNENQVIALEDLNVGGMLKNRKLSRAISQAGWYEFRSLCEGKAEKHNRDFRVISRWEPTSQVCSECGYRWGKIDLSVRSIVCINCGVEHDRDDNASVNIEQAGLKVGVGHTHDSKRTGSACKTSNGAVCVEPSTHREYVQLTLFDW

SEQ ID NO: 158 - protein, 392 aa, synthetic construct
MKSRWTFRCYPTPEQEQHLARTFGCVRFVWNWALRARTDAFRAGERIGYPATDKALTLLKQQPETVWLNEVSSVCLQQALRDLQVAFSNFFDKRAAHPSFKRKEARQSANYTERGFSFDHERRILKLAKIGAIKVKWSRKAIPHPSSIRLIRTASGKYFVSLVVETQPAPMPETGESVGVDFGVARLATLSNGERISNPKHGAKWQRRLAFYQKRLARATKGSKRRMRIKRHVARIHEKIGNSRSDTLHKLSTDLVTRFDLICVEDLNLRGMVKNHSLARSLHDASIGSAIRMIEEKAERYGKNVVKIDRWFPSSKTCSDCGHIVEQLPLNVREWTCPECGTTHDRDANAAANILAVGQTVSAHGGTVRRSRAKASERKSQRSANRQGVNRA

SEQ ID NO: 159 - protein, 500 aa, synthetic construct
KEPLNIGKTAKAVFKEIDPTSLNRAANYDASIELNCKECKFKPFKNVKRYEFNFYNNWYRCNPNSCLQSTYKAQVRKVEIGYEKLKNEILTQMQYYPWFGRLYQNFFHDERDKMTSLDEIQVIGVQNKVFFNTVEKAWREIIKKRFKDNKETMETIPELKHAAGHGKRKLSNKSLLRRRFAFVQKSFKFVDNSDVSYRSFSNNIACVLPSRIGVDLGGVISRNPKREYIPQEISFNAFWKQHEGLKKGRNIEIQSVQYKGETVKRIEADTGEDKAWGKNRQRRFTSLILKLVPKQGGKKVWKYPEKRNEGNYEYFPIPIEFILDSGETSIRFGGDEGEAGKQKHLVIPFNDSKATPLASQQTLLENSRFNAEVKSCIGLAIYANYFYGYARNYVISSIYHKNSKNGQAITAIYLESIAHNYVKAIERQLQNLLLNLRDFSFMESHKKELKKYFGGDLEGTGGAQKRREKEEKIEKEIEQSYLPRLIRLSLTKMVTKQVEM

SEQ ID NO: 160 - protein, 507 aa, synthetic construct
ELIVNENKDPLNIGKTAKAVFKEIDPTSINRAANYDASIELACKECKFKPFNNTKRHDFSFYSNWHRCSPNSCLQSTYRAKIRKTEIGYEKLKNEILNQMQYYPWFGRLYQNFFNDQRDKMTSLDEIQVTGVQNKIFFNTVEKAWREIIKKRFRDNKETMRTIPDLKNKSGHGSRKLSNKSLLRRRFAFAQKSFKLVDNSDVSYRAFSNNVACVLPSKIGVDIGGIINKDLKREYIPQEITFNVFWKQHDGLKKGRNIEIHSVQYKGEIVKRIEADTGEDKAWGKNRQRRFTSLILKITPKQGGKKIWKFPEKKNASDYEYFPIPIEFILDNGDASIKFGGEEGEVGKQKHLLIPFNDSKATPLSSKQMLLETSRFNAEVKSTIGLALYANYFVSYARNYVIKSTYHKNSKKGQIVTEIYLESISQNFVRAIQRQLQSLMLNLKDWGFMQTHKKELKKYFGSDLEGSKGGQKRREKEEKIEKEIEASYLPRLIRLSLTKSVTKAEEM

SEQ ID NO: 161 - protein, 529 aa, synthetic construct
PEEKTSKLKPNSINLAANYDANEKFNCKECKFHPFKNKKRYEFNFYNNLHGCKSCTKSTNNPAVKRIEIGYQKLKFEIKNQMEAYPWFGRLRINFYSDEKRKMSELNEMQVTGVKNKIFFDAIECAWREILKKRFRESKETLITIPKLKNKAGHGARKHRNKKLLIRRRAFMKKNFHFLDNDSISYRSFANNIACVLPSKVGVDIGGIISPDVGKDIKPVDISLNLMWASKEGIKSGRKVEIYSTQYDGNMVKKIEAETGEDKSWGKNRKRRQTSLLLSIPKPSKQVQEFDFKEWPRYKDIEKKVQWRGFPIKIIFDSNHNSIEFGTYQGGKQKVLPIPFNDSKTTPLGSKMNKLEKLRFNSKIKSRLGSAIAANKFLEAARTYCVDSLYHEVSSANAIGKGKIFIEYYLEILSQNYIEAAQKQLQRFIESIEQWFVADPFQGRLKQYFKDDLKRAKCFLCANREVQTTCYAAVKLHKSCAEKVKDKNKELAIKERNNKEDAVIKEVEASNYPRVIRLKLTKTITNKAM

SEQ ID NO: 162 - protein, 726 aa, synthetic construct
SESENKIIEQYYAFLYSFRDKYEKPEFKNRGDIKRKLQNKWEDFLKEQNLKNDKKLSNYIFSNRNFRRSYDREEENEEGIDEKKSKPKRINCFEKEKNLKDQYDKDAINASANKDGAQKWGCFECIFFPMYKIESGDPNKRIIINKTRFKLFDFYLNLKGCKSCLRSTYHPYRSNVYIESNYDKLKREIGNFLQQKNIFQRMRKAKVSEGKYLTNLDEYRLSCVAMHFKNRWLFFDSIQKVLRETIKQRLKQMRESYDEQAKTKRSKGHGRAKYEDQVRMIRRRAYSAQAHKLLDNGYITLFDYDDKEINKVCLTAINQEGFDIGGYLNSDIDNVMPPIEISFHLKWKYNEPILNIESPFSKAKISDYLRKIREDLNLERGKEGKARSKKNVRRKVLASKGEDGYKKIFTDFFSKWKEELEGNAMERVLSQSSGDIQWSKKKRIHYTTLVLNINLLDKKGVGNLKYYEIAEKTKILSFDKNENKFWPITIQVLLDGYEIGTEYDEIKQLNEKTSKQFTIYDPNTKIIKIPFTDSKAVPLGMLGINIATLKTVKKTERDIKVSKIFKGGLNSKIVSKIGKGIYAGYFPTVDKEILEEVEEDTLDNEFSSKSQRNIFLKSIIKNYDKMLKEQLFDFYSFLVRNDLGVRFLTDRELQNIEDESFNLEKRFFETDRDRIARWFDNTNTDDGKEKFKKLANEIVDSYKPRLIRLPVVRVIKRIQPVKQREM

SEQ ID NO: 163 - protein, 517 aa, synthetic construct
KYSTRDFSELNEIQVTACKQDEFFKVIQNAWREIIKKRFLENRENFIEKKIFKNKKGRGKRQESDKTIQRNRASVMKNFQLIENEKIILRAPSGHVACVFPVKVGLDIGGFKTDDLEKNIFPPRTITINVFWKNRDRQRKGRKLEVWGIKARTKLIEKVHKWDKLEEVKKKRLKSLEQKQEKSLDNWSEVNNDSFYKVQIDELQEKIDKSLKGRTMNKILDNKAKESKEAEGLYIEWEKDFEGEMLRRIEASTGGEEKWGKRRQRRHTSLLLDIKNNSRGSKEIINFYSYAKQGKKEKKIEFFPFPLTITLDAEEESPLNIKSIPIEDKNATSKYFSIPFTETRATPLSILGDRVQKFKTKNISGAIKRNLGSSISSCKIVQNAETSAKSILSLPNVKEDNNMEIFINTMSKNYFRAMMKQMESFIFEMEPKTLIDPYKEKAIKWFEVAASSRAKRKLKKLSKADIKKSELLLSNTEEFEKEKQEKLEALEKEIEEFYLPRIVRLQLTKTILETPVM

SEQ ID NO: 164 - protein, 481 aa, synthetic construct
KKLQLLGHKILLKEYDPNAVNAAANFETSTAELCGQCKMKPFKNKRRFQYTFGKNYHGCLSCIQNVYYAKKRIVQIAKEELKHQLTDSIASIPYKYTSLFSNTNSIDELYILKQERAAFFSNTNSIDELYITGIENNIAFKVISAIWDEIIKKRRQRYAESLTDTGTVKANRGHGGTAYKSNTRQEKIRALQKQTLHMVTNPYISLARYKNNYIVATLPRTIGMHIGAIKDRDPQKKLSDYAINFNVFWSDDRQLIELSTVQYTGDMVRKIEAETGENNKWGENMKRTKTSLLLEILTKKTTDELTFKDWAFSTKKEIDSVTKKTYQGFPIGIIFEGNESSVKFGSQNYFPLPFDAKITPPTAEGFRLDWLRKGSFSSQMKTSYGLAIYSNKVTNAIPAYVIKNMFYKIARAENGKQIKAKFLKKYLDIAGNNYVPFIIMQHYRVLDTFEEMPISQPKVIRLSLTKTQHIIIKKDKTDSKM

SEQ ID NO: 165 - protein, 534 aa, synthetic construct
NTSNLINLGKKAINISANYDANLEVGCKNCKFLSSNGNFPRQTNVKEGCHSCEKSTYEPSIYLVKIGERKAKYDVLDSLKKFTFQSLKYQSKKSMKSRNKKPKELKEFVIFANKNKAFDVIQKSYNHLILQIKKEINRMNSKKRKKNHKRRLFRDREKQLNKLRLIESSNLFLPRENKGNNHVFTYVAIHSVGRDIGVIGSYDEKLNFETELTYQLYFNDDKRLLYAYKPKQNKIIKIKEKLWNLRKEKEPLDLEYEKPLNKSITFSIKNDNLFKVSKDLMLRRAKFNIQGKEKLSKEERKINRDLIKIKGLVNSMSYGRFDELKKEKNIWSPHIYREVRQKEIKPCLIKNGDRIEIFEQLKKKMERLRRFREKRQKKISKDLIFAERIAYNFHTKSIKNTSNKINIDQEAKRGKASYMRKRIGYETFKNKYCEQCLSKGNVYRNVQKGCSCFENPFDWIKKGDENLLPKKNEDLRVKGAFRDEALEKQIVKIAFNIAKGYEDFYDNLGESTEKDLKLKFKVGTTINEQESLKL

SEQ ID NO: 166 - protein, 537 aa, synthetic construct
TSNPIKLGKKAINISANYDSNLQIGCKNCKFLSYNGNFPRQTNVKEGCHSCEKSTYEPPVYTVRIGERRSKYDVLDSLKKFIFLSLKYRQSKKMKTRSKGIRGLEEFVISANLKKAMDVIQKSYRHLILNIKNEIVRMNGKKRNKNHKRLLFRDREKQLNKLRLIEGSSFFKPPTVKGDNSIFTCVAIHNIGRDIGIAGDYFDKLEPKIELTYQLYYEYNPKKESEINKRLLYAYKPKQNKIIEIKEKLWNLRKEKSPLDLEYEKPLTKSITFLVKRDGVFRISKDLMLRKAKFIIQGKEKLSKEERKINRDLIKIKSNIISLTYGRFDELKKDKTIWSPHIFRDVKQGKITPCIERKGDRMDIFQQLRKKSERLRENRKKRQKKISKDLIFAERIAYNFHTKSIKNTSNLINIKHEAKRGKASYMRKRIGNETFRIKYCEQCFPKNNVYKNVQKGCSCFEDPFEYIKKGNEDLIPNKNQDLKAKGAFRDDALEKQIIKVAFNIAKGYEDFYENLKKTTEKDIRLKFKVGTIISEEM

SEQ ID NO: 167 - protein, 541 aa, synthetic construct
NNSINLSKKAINISANYDANLQVRCKNCKFLSSNGNFPRQTDVKEGCHSCEKSTYEPPVYDVKIGEIKAKYEVLDSLKKFTFQSLKYQLSKSMKFRSKKIKELKEFVIFAKESKALNVINRSYKHLILNIKNDINRMNSKKRIKNHKGRLFLDRQKQLSKLKLIEGSSFFVPAKNVGNKSVFTCVAIHSIGRDIGIAGLYDSFTKPVNEITYQIFFSGERRLLYAYKPKQLKILSIKENLWSLKNEKKPLDLLYEKPLGKNLNFNVKGGDLFRVSKDLMIRNAKFNVHGRQRLSDEERLINRNFIKIKGEVVSLSYGRFEELKKDRKLWSPHIFKDVRQNKIKPCLVMQGQRIDIFEQLKRKLELLKKIRKSRQKKLSKDLIFGERIAYNFHTKSIKNTSNKINIDSDAKRGRASYMRKRIGNETFKLKYCDVCFPKANVYRRVQNGCSCSENPYNYIKKGDKDLLPKKDEGLAIKGAFRDEKLNKQIIKVAFNIAKGYEDFYDDLKKRTEKDVDLKFKIGTTVLDQKPMEIFDGIVITWL

SEQ ID NO: 168 - protein, 542 aa, synthetic construct
LLTTVVETNNLAKKAINVAANFDANIDRQYYRCTPNLCRFIAQSPRETKEKDAGCSSCTQSTYDPKVYVIKIGKLLAKYEILKSLKRFLFMNRYFKQKKTERAQQKQKIGTELNEMSIFAKATNAMEVIKRATKHCTYDIIPETKSLQMLKRRRHRVKVRSLLKILKERRMKIKKIPNTFIEIPKQAKKNKSDYYVAAALKSCGIDVGLCGAYEKNAEVEAEYTYQLYYEYKGNSSTKRILYCYNNPQKNIREFWEAFYIQGSKSHVNTPGTIRLKMEKFLSPITIESEALDFRVWNSDLKIRNGQYGFIKKRSLGKEAREIKKGMGDIKRKIGNLTYGKSPSELKSIHVYRTERENPKKPRAARKKEDNFMEIFEMQRKKDYEVNKKRRKEATDAAKIMDFAEEPIRHYHTNNLKAVRRIDMNEQVERKKTSVFLKRIMQNGYRGNYCRKCIKAPEGSNRDENVLEKNEGCLDCIGSEFIWKKSSKEKKGLWHTNRLLRRIRLQCFTTAKAYENFYNDLFEKKESSLDIIKLKVSITTKSM

SEQ ID NO: 169 - protein, 564 aa, synthetic construct
ASTMNLAKQAINFAANYDSNLEIGCKGCKFMSTWSKKSNPKFYPRQNNQANKCHSCTYSTGEPEVPIIEIGERAAKYKIFTALKKFVFMSVAYKERRRQRFKSKKPKELKELAICSNREKAMEVIQKSVVHCYGDVKQEIPRIRKIKVLKNHKGRLFYKQKRSKIKIAKLEKGSFFKTFIPKVHNNGCHSCHEASLNKPILVTTALNTIGADIGLINDYSTIAPTETDISWQVYYEFIPNGDSEAVKKRLLYFYKPKGALIKSIRDKYFKKGHENAVNTGFFKYQGKIVKGPIKFVNNELDFARKPDLKSMKIKRAGFAIPSAKRLSKEDREINRESIKIKNKIYSLSYGRKKTLSDKDIIKHLYRPVRQKGVKPLEYRKAPDGFLEFFYSLKRKERRLRKQKEKRQKDMSEIIDAADEFAWHRHTGSIKKTTNHINFKSEVKRGKVPIMKKRIANDSFNTRHCGKCVKQGNAINKYYIEKQKNCFDCNSIEFKWEKAALEKKGAFKLNKRLQYIVKACFNVAKAYESFYEDFRKGEEESLDLKFKIGTTTTLKQYPQNKARAM

SEQ ID NO: 170 - protein, 610 aa, synthetic construct
HSHNLMLTKLGKQAINFAANYDANLEIGCKNCKFLSYSPKQANPKKYPRQTDVHEDGNIACHSCMQSTKEPPVYIVPIGERKSKYEILTSLNKFTFLALKYKEKKRQAFRAKKPKELQELAIAFNKEKAIKVIDKSIQHLILNIKPEIARIQRQKRLKNRKGKLLYLHKRYAIKMGLIKNGKYFKVGSPKKDGKKLLVLCALNTIGRDIGIIGNIEENNRSETEITYQLYFDCLDANPNELRIKEIEYNRLKSYERKIKRLVYAYKPKQTKILEIRSKFFSKGHENKVNTGSFNFENPLNKSISIKVKNSAFDFKIGAPFIMLRNGKFHIPTKKRLSKEEREINRTLSKIKGRVFRLTYGRNISEQGSKSLHIYRKERQHPKLSLEIRKQPDSFIDEFEKLRLKQNFISKLKKQRQKKLADLLQFADRIAYNYHTSSLEKTSNFINYKPEVKRGRTSYIKKRIGNEGFEKLYCETCIKSNDKENAYAVEKEELCFVCKAKPFTWKKTNKDKLGIFKYPSRIKDFIRAAFTVAKSYNDFYENLKKKDLKNEIFLKFKIGLILSHEKKNHISIAKSVAEDERISGKSIKNILNKSIKLEKNCYSCFFHKEDM

SEQ ID NO: 171 - protein, 552 aa, synthetic construct
SLERVIDKRNLAKKAINIAANFDANINKGFYRCETNQCMFIAQKPRKTNNTGCSSCLQSTYDPVIYVVKVGEMLAKYEILKSLKRFVFMNRSFKQKKTEKAKQKERIGGELNEMSIFANAALAMGVIKRAIRHCHVDIRPEINRLSELKKTKHRVAAKSLVKIVKQRKTKWKGIPNSFIQIPQKARNKDADFYVASALKSGGIDIGLCGTYDKKPHADPRWTYQLYFDTEDESEKRLLYCYNDPQAKIRDFWKTFYERGNPSMVNSPGTIEFRMEGFFEKMTPISIESKDFDFRVWNKDLLIRRGLYEIKKRKNLNRKAREIKKAMGSVKRVLANMTYGKSPTDKKSIPVYRVEREKPKKPRAVRKEENELADKLENYRREDFLIRNRRKREATEIAKIIDAAEPPIRHYHTNHLRAVKRIDLSKPVARKNTSVFLKRIMQNGYRGNYCKKCIKGNIDPNKDECRLEDIKKCICCEGTQNIWAKKEKLYTGRINVLNKRIKQMKLECFNVAKAYENFYDNLAALKEGDLKVLKLKVSIPALNPEASDPEEDM

SEQ ID NO: 172 - protein, 534 aa, synthetic construct
NASINLGKRAINLSANYDSNLVIGCKNCKFLSFNGNFPRQTNVREGCHSCDKSTYAPEVYIVKIGERKAKYDVLDSLKKFTFQSLKYQIKKSMRERSKKPKELLEFVIFANKDKAFNVIQKSYEHLILNIKQEINRMNGKKRIKNHKKRLFKDREKQLNKLRLIGSSSLFFPRENKGDKDLFTYVAIHSVGRDIGVAGSYESHIEPISDLTYQLFINNEKRLLYAYKPKQNKIIELKENLWNLKKEKKPLDLEFTKPLEKSITFSVKNDKLFKVSKDLMLRQAKFNIQGKEKLSKEERQINRDFSKIKSNVISLSYGRFEELKKEKNIWSPHIYREVKQKEIKPCIVRKGDRIELFEQLKRKMDKLKKFRKERQKKISKDLNFAERIAYNFHTKSIKNTSNKINIDQEAKRGKASYMRKRIGNESFRKKYCEQCFSVGNVYHNVQNGCSCFDNPIELIKKGDEGLIPKGKEDRKYKGALRDDNLQMQIIRVAFNIAKGYEDFYNNLKEKTEKDLKLKFKIGTTISTQESNNKEM

SEQ ID NO: 173 - protein, 577 aa, synthetic construct
SNLIKLGKQAINFAANYDANLEVGCKNCKFLSSTNKYPRQTNVHLDNKMACRSCNQSTMEPAIYIVRIGEKKAKYDIYNSLTKFNFQSLKYKAKRSQRFKPKQPKELQELSIAVRKEKALDIIQKSIDHLIQDIRPEIPRIKQQKRYKNHVGKLFYLQKRRKNKLNLIGKGSFFKVFSPKEKKNELLVICALTNIGRDIGLIGNYNTIINPLFEVTYQLYYDYIPKKNNKNVQRRLLYAYKSKNEKILKLKEAFFKRGHENAVNLGSFSYEKPLEKSLTLKIKNDKDDFQVSPSLRIRTGRFFVPSKRNLSRQEREINRRLVKIKSKIKNMTYGKFETARDKQSVHIFRLERQKEKLPLQFRKDEKEFMEEFQKLKRRTNSLKKLRKSRQKKLADLLQLSEKVVYNNHTGTLKKTSNFLNFSSSVKRGKTAYIKELLGQEGFETLYCSNCINKGQKTRYNIETKEKCFSCKDVPFVWKKKSTDKDRKGAFLFPAKLKDVIKATFTVAKAYEDFYDNLKSIDEKKPYIKFKIGLILAHVRHEHKARAKEEAGQKNIYNKPIKIDKNCKECFFFKEEAM

SEQ ID NO: 174 - protein, 613 aa, synthetic construct
NTTRKKFRKRTGFPQSDNIKLAYCSAIVRAANLDADIQKKHNQCNPNLCVGIKSNEQSRKYEHSDRQALLCYACNQSTGAPKVDYIQIGEIGAKYKILQMVNAYDFLSLAYNLTKLRNGKSRGHQRMSQLDEVVIVADYEKATEVIKRSINHLLDDIRGQLSKLKKRTQNEHITEHKQSKIRRKLRKLSRLLKRRRWKWGTIPNPYLKNWVFTKKDPELVTVALLHKLGRDIGLVNRSKRRSKQKLLPKVGFQLYYKWESPSLNNIKKSKAKKLPKRLLIPYKNVKLFDNKQKLENAIKSLLESYQKTIKVEFDQFFQNRTEEIIAEEQQTLERGLLKQLEKKKNEFASQKKALKEEKKKIKEPRKAKLLMEESRSLGFLMANVSYALFNTTIEDLYKKSNVVSGCIPQEPVVVFPADIQNKGSLAKILFAPKDGFRIKFSGQHLTIRTAKFKIRGKEIKILTKTKREILKNIEKLRRVWYREQHYKLKLFGKEVSAKPRFLDKRKTSIERRDPNKLADQTDDRQAELRNKEYELRHKQHKMAERLDNIDTNAQNLQTLSFWVGEADKPPKLDEKDARGFGVRTCISAWKWFMEDLLKKQEEDPLLKLKLSIM

SEQ ID NO: 175 - protein, 615 aa, synthetic construct
PKKPKFQKRTGFPQPDNLRKEYCLAIVRAANLDADFEKKCTKCEGIKTNKKGNIVKGRTYNSADKDNLLCYACNISTGAPAVDYVFVGALEAKYKILQMVKAYDFHSLAYNLAKLWKGRGRGHQRMGGLNEVVIVSNNEKALDVIEKSLNHFHDEIRGELSRLKAKFQNEHLHVHKESKLRRKLRKISRLLKRRRWKWDVIPNSYLRNFTFTKTRPDFISVALLHRVGRDIGLVTKTKIPKPTDLLPQFGFQIYYTWDEPKLNKLKKSRLRSEPKRLLVPYKKIELYKNKSVLEEAIRHLAEVYTEDLTICFKDFFETQKRKFVSKEKESLKRELLKELTKLKKDFSERKTALKRDRKEIKEPKKAKLLMEESRSLGFLAANTSYALFNLIAADLYTKSKKACSTKLPRQLSTILPLEIKEHKSTTSLAIKPEEGFKIRFSNTHLSIRTPKFKMKGADIKALTKRKREILKNATKLEKSWYGLKHYKLKLYGKEVAAKPRFLDKRNPSIDRRDPKELMEQIENRRNEVKDLEYEIRKGQHQMAKRLDNVDTNAQNLQTKSFWVGEADKPPELDSMEAKKLGLRTCISAWKWFMKDLVLLQEKSPNLKLKLSLTEM

SEQ ID NO: 176 - protein, 775 aa, synthetic construct
KFSKRQEGFLIPDNIDLYKCLAIVRSANLDADVQGHKSCYGVKKNGTYRVKQNGKKGVKEKGRKYVFDLIAFKGNIEKIPHEAIEEKDQGRVIVLGKFNYKLILNIEKNHNDRASLEIKNKIKKLVQISSLETGEFLSDLLSGKIGIDEVYGIIEPDVFSGKELVCKACQQSTYAPLVEYMPVGELDAKYKILSAIKGYDFLSLAYNLSRNRANKKRGHQKLGGGELSEVVISANYDKALNVIKRSINHYHVEIKPEISKLKKKMQNEPLKVMKQARIRRELHQLSRKVKRLKWKWGMIPNPELQNIIFEKKEKDFVSYALLHTLGRDIGLFKDTSMLQVPNISDYGFQIYYSWEDPKLNSIKKIKDLPKRLLIPYKRLDFYIDTILVAKVIKNLIELYRKSYVYETFGEEYGYAKKAEDILFDWDSINLSEGIEQKIQKIKDEFSDLLYEARESKRQNFVESFENILGLYDKNFASDRNSYQEKIQSMIIKKQQENIEQKLKREFKEVIERGFEGMDQNKKYYKVLSPNIKGGLLYTDTNNLGFFRSHLAFMLLSKISDDLYRKNNLVSKGGNKGILDQTPETMLTLEFGKSNLPNISIKRKFFNIKYNSSWIGIRKPKFSIKGAVIREITKKVRDEQRLIKSLEGVWHKSTHFKRWGKPRFNLPRHPDREKNNDDNLMESITSRREQIQLLLREKQKQQEKMAGRLDKIDKEIQNLQTANFQIKQIDKKPALTEKSEGKQSVRNALSAWKWFMEDLIKYQKRTPILQLKLAKM

SEQ ID NO: 177 - protein, 777 aa, synthetic construct
KFSKRQEGFVIPENIGLYKCLAIVRSANLDADVQGHVSCYGVKKNGTYVLKQNGKKSIREKGRKYASDLVAFKGDIEKIPFEVIEEKKKEQSIVLGKFNYKLVLDVMKGEKDRASLTMKNKSKKLVQVSSLGTDEFLLTLLNEKFGIEEIYGIIEPEVFSGKKLVCKACQQSTYAPLVEYMPVGELDSKYKILSAIKGYDFLSLAYNLARHRSNKKRGHQKLGGGELSEVVISANNAKALNVIKRSLNHYYSEIKPEISKLRKKMQNEPLKVGKQARMRRELHQLSRKVKRLKWKWGKIPNLELQNITFKESDRDFISYALLHTLGRDIGMFNKTEIKMPSNILGYGFQIYYDWEEPKLNTIKKSKNTPKRILIPYKKLDFYNDSILVARAIKELVGLFQESYEWEIFGNEYNYAKEAEVELIKLDEESINGNVEKKLQRIKENFSNLLEKAREKKRQNFIESFESIARLYDESFTADRNEYQREIQSFIIEKQKQSIEKKLKNEFKKIVEKKFNEQEQGKKHYRVLNPTIINEFLPKDKNNLGFLRSKIAFILLSKISDDLYKKSNAVSKGGEKGIIKQQPETILDLEFSKSKLPSINIKKKLFNIKYTSSWLGIRKPKFNIKGAKIREITRRVRDVQRTLKSAESSWYASTHFRRWGFPRFNQPRHPDKEKKSDDRLIESITLLREQIQILLREKQKGQKEMAGRLDDVDKKIQNLQTANFQIKQTGDKPALTEKSAGKQSFRNALSAWKWFMENLLKYQNKTPDLKLKIARTVM

SEQ ID NO: 178 - protein, 610 aa, synthetic construct
KWIEPNNIDFNKCLAITRSANLDADVQGHKMCYGIKTNGTYKAIGKINKKHNTGIIEKRRTYVYDLIVTKEKNEKIVKKTDFMAIDEEIEFDEKKEKLLKKYIKAEVLGTGELIRKDLNDGEKFDDLCSIEEPQAFRRSELVCKACNQSTYASDIRYIPIGEIEAKYKILKAIKGYDFLSLKYNLGRLRDSKKRGHQKMGQGELKEFVICANKEKALDVIKRSLNHYLNEVKDEISRLNKKMQNEPLKVNDQARWRRELNQISRRLKRLKWKWGEIPNPELKNLIFKSSRPEFVSYALIHTLGRDIGLINETELKPNNIQEYGFQIYYKWEDPELNHIKKVKNIPKRFIIPYKNLDLFGKYTILSRAIEGILKLYSSSFQYKSFKDPNLFAKEGEKKITNEDFELGYDEKIKKIKDDFKSYKKALLEKKKNTLEDSLNSILSVYEQSLLTEQINNVKKWKEGLLKSKESIHKQKKIENIEDIISRIEELKNVEGWIRTKERDIVNKEETNLKREIKKELKDSYYEEVRKDFSDLKKGEESEKKPFREEPKPIVIKDYIKFDVLPGENSALGFFLSHLSFNLFDSIQYELFEKSRLSSSKHPQIPETILDL

SEQ ID NO: 179 - protein, 632 aa, synthetic construct
FRKFVKRSGAPQPDNLNKYKCIAIVRAANLDADIMSNESSNCVMCKGIKMNKRKTAKGAAKTTELGRVYAGQSGNLLCTACTKSTMGPLVDYVPIGRIRAKYTILRAVKEYDFLSLAYNLARTRVSKKGGRQKMHSLSELVIAAEYEIAWNIIKSSVIHYHQETKEEISGLRKKLQAEHIHKNKEARIRREMHQISRRIKRLKWKWHMIPNSELHNFLFKQQDPSFVAVALLHTLGRDIGMINKPKGSAKREFIPEYGFQIYYKWMNPKLNDINKQKYRKMPKRSLIPYKNLNVFGDRELIENAMHKLLKLYDENLEVKGSKFFKTRVVAISSKESEKLKRDLLWKGELAKIKKDFNADKNKMQELFKEVKEPKKANALMKQSRNMGFLLQNISYGALGLLANRMYEASAKQSKGDATKQPSIVIPLEMEFGNAFPKLLLRSGKFAMNVSSPWLTIRKPKFVIKGNKIKNITKLMKDEKAKLKRLETSYHRATHFRPTLRGSIDWDSPYFSSPKQPNTHRRSPDRLSADITEYRGRLKSVEAELREGQRAMAKKLDSVDMTASNLQTSNFQLEKGEDPRLTEIDEKGRSIRNCISSWKKFMEDLMKAQEANPVIKIKIALKDESSVLSEDSM

SEQ ID NO: 180 - protein, 625 aa, synthetic construct
KFHPENLNKSYCLAIVRAANLDADIQGHINCIGIKSNKSDRNYENKLESLQNVELLCKACTKSTYKPNINSVPVGEKKAKYSILSEIKKYDFNSLVYNLKKYRKGKSRGHQKLNELRELVITSEYKKALDVINKSVNHYLVNIKNKMSKLKKILQNEHIHVGTLARIRRERNRISRKLDHYRKKWKFVPNKILKNYVFKNQSPDFVSVALLHKLGRDIGLITKTAILQKSFPEYSLQLYYKYDTPKLNYLKKSKFKSLPKRILISYKYPKFDINSNYIEESIDKLLKLYEESPIYKNNSKIIEFFKKSEDNLIKSENDSLKRGIMKEFEKVTKNFSSKKKKLKEELKLKNEDKNSKMLAKVSRPIGFLKAYLSYMLFNIISNRIFEFSRKSSGRIPQLPSCIINLGNQFENFKNELQDSNIGSKKNYKYFCNLLLKSSGFNISYEEEHLSIKTPNFFINGRKLKEITSEKKKIRKENEQLIKQWKKLTFFKPSNLNGKKTSDKIRFKSPNNPDIERKSEDNIVENIAKVKYKLEDLLSEQRKEFNKLAKKHDGVDVEAQCLQTKSFWIDSNSPIKKSLEKKNEKVSVKKKMKAIRSCISAWKWFMADLIEAQKETPMIKLKLALM

SEQ ID NO: 181 - protein, 517 aa, synthetic construct
TTLVPSHLAGIEVMDETTSRNEDMIQKETSRSNEDENYLGVKNKCGINVHKSGRGSSKHEPNMPPEKSGEGQMPKQDSTEMQQRFDESVTGETQVSAGATASIKTDARANSGPRVGTARALIVKASNLDRDIKLGCKPCEYIRSELPMGKKNGCNHCEKSSDIASVPKVESGFRKAKYELVRRFESFAADSISRHLGKEQARTRGKRGKKDKKEQMGKVNLDEIAILKNESLIEYTENQILDARSNRIKEWLRSLRLRLRTRNKGLKKSKSIRRQLITLRRDYRKWIKPNPYRPDEDPNENSLRLHTKLGVDIGVQGGDNKRMNSDDYETSFSITWRDTATRKICFTKPKGLLPRHMKFKLRGYPELILYNEELRIQDSQKFPLVDWERIPIFKLRGVSLGKKKVKALNRITEAPRLVVAKRIQVNIESKKKKVLTRYVYNDKSINGRLVKAEDSNKDPLLEFKKQAEEINSDAKYYENQEIAKNYLWGCEGLHKNLLEEQTKNPYLAFKYGFLNIV

SEQ ID NO: 182 - protein, 410 aa, synthetic construct
LDFKRTCSQELVLLPEIEGLKLSGTQGVTSLAKKLINKAANVDRDESYGCHHCIHTRTSLSKPVKKDCNSCNQSTNHPAVPITLKGYKIAFYELWHRFTSWAVDSISKALHRNKVMGKVNLDEYAVVDNSHIVCYAVRKCYEKRQRSVRLHKRAYRCRAKHYNKSQPKVGRIYKKSKRRNARNLKKEAKRYFQPNEITNGSSDALFYKIGVDLGIAKGTPETEVKVDVSICFQVYYGDARRVLRVRKMDELQSFHLDYTGKLKLKGIGNKDTFTIAKRNESLKWGSTKYEVSRAHKKFKPFGKKGSVKRKCNDYFRSIASWSCEAASQRAQSNLKNAFPYQKALVKCYKNLDYKGVKKNDMWYRLCSNRIFRYSRIAEDIAQYQSDKGKAKFEFVILAQSVAEYDISAIM

SEQ ID NO: 183 - protein, 602 aa, synthetic construct
VFLTDDKRKTALRKIRSAFRKTAEIALVRAQEADSLDRQAKKLTIETVSFGAPGAKNAFIGSLQGYNWNSHRANVPSSGSAKDVFRITELGLGIPQSAHEASIGKSFELVGNVVRYTANLLSKGYKKGAVNKGAKQQREIKGKEQLSFDLISNGPISGDKLINGQKDALAWWLIDKMGFHIGLAMEPLSSPNTYGITLQAFWKRHTAPRRYSRGVIRQWQLPFGRQLAPLIHNFFRKKGASIPIVLTNASKKLAGKGVLLEQTALVDPKKWWQVKEQVTGPLSNIWERSVPLVLYTATFTHKHGAAHKRPLTLKVIRISSGSVFLLPLSKVTPGKLVRAWMPDINILRDGRPDEAAYKGPDLIRARERSFPLAYTCVTQIADEWQKRALESNRDSITPLEAKLVTGSDLLQIHSTVQQAVEQGIGGRISSPIQELLAKDALQLVLQQLFMTVDLLRIQWQLKQEVADGNTSEKAVGWAIRISNIHKDAYKTAIEPCTSALKQAWNPLSGFEERTFQLDASIVRKRSTAKTPDDELVIVLRQQAAEMTVAVTQSVSKELMELAVRHSATLHLLVGEVASKQLSRSADKDRGAMDHWKLLSQSM

SEQ ID NO: 184 - protein, 494 aa, synthetic construct
EDLLQKALNTATNVAAIERHSCISCLFTESEIDVKYKTPDKIGQNTAGCQSCTFRVGYSGNSHTLPMGNRIALDKLRETIQRYAWHSLLFNVPPAPTSKRVRAISELRVAAGRERLFTVITFVQTNILSKLQKRYAANWTPKSQERLSRLREEGQHILSLLESGSWQQKEVVREDQDLIVCSALTKPGLSIGAFCRPKYLKPAKHALVLRLIFVEQWPGQIWGQSKRTRRMRRRKDVERVYDISVQAWALKGKETRISECIDTMRRHQQAYIGVLPFLILSGSTVRGKGDCPILKEITRMRYCPNNEGLIPLGIFYRGSANKLLRVVKGSSFTLPMWQNIETLPHPEPFSPEGWTATGALYEKNLAYWSALNEAVDWYTGQILSSGLQYPNQNEFLARLQNVIDSIPRKWFRPQGLKNLKPNGQEDIVPNEFVIPQNAIRAHHVIEWYHKTNDLVAKTLLGWGSQTTLNQTRPQGDLRFTYTRYYFREKEVPEV

SEQ ID NO: 185 - protein, 649 aa, synthetic construct
VPKKKLMRELAKKAVFEAIFNDPIPGSFGCKRCTLIDGARVTDAIEKKQGAKRCAGCEPCTFHTLYDSVKHALPAATGCDRTAIDTGLWEILTALRSYNWMSFRRNAVSDASQKQVWSIEELAIWADKERALRVILSALTHTIGKLKNGFSRDGVWKGGKQLYENLAQKDLAKGLFANGEIFGKELVEADHDMLAWTIVPNHQFHIGLIRGNWKPAAVEASTAFDARWLTNGAPLRDTRTHGHRGRRFNRTEKLTVLCIKRDGGVSEEFRQERDYELSVMLLQPKNKLKPEPKGELNSFEDLHDHWWFLKGDEATALVGLTSDPTVGDFIQLGLYIRNPIKAHGETKRRLLICFEPPIKLPLRRAFPSEAFKTWEPTINVFRNGRRDTEAYYDIDRARVFEFPETRVSLEHLSKQWEVLRLEPDRENTDPYEAQQNEGAELQVYSLLQEAAQKMAPKVVIDPFGQFPLELFSTFVAQLFNAPLSDTKAKIGKPLDSGFVVESHLHLLEEDFAYRDFVRVTFMGTEPTFRVIHYSNGEGYWKKTVLKGKNNIRTALIPEGAKAAVDAYKNKRCPLTLEAAILNEEKDRRLVLGNKALSLLAQTARGNLTILEALAAEVLRPLSGTEGVVHLHACVTRHSTLTESTETDNM

SEQ ID NO: 186 - protein, 414 aa, synthetic construct
VEKLFSERLKRAMWLKNEAGRAPPAETLTLKHKRVSGGHEKVKEELQRVLRSLSGTNQAAWNLGLSGGREPKSSDALKGEKSRVVLETVVFHSGHNRVLYDVIEREDQVHQRSSIMHMRRKGSNLLRLWGRSGKVRRKMREEVAEIKPVWHKDSRWLAIVEEGRQSVVGISSAGLAVFAVQESQCTTAEPKPLEYVVSIWFRGSKALNPQDRYLEFKKLKTTEALRGQQYDPIPFSLKRGAGCSLAIRGEGIKFGSRGPIKQFFGSDRSRPSHADYDGKRRLSLFSKYAGDLADLTEEQWNRTVSAFAEDEVRRATLANIQDFLSISHEKYAERLKKRIESIEEPVSASKLEAYLSAIFETFVQQREALASNFLMRLVESVALLISLEEKSPRVEFRVARYLAESKEGFNRKAM

SEQ ID NO: 187 - protein, 413 aa, synthetic construct
VVITQSELYKERLLRVMEIKNDRGRKEPRESQGLVLRFTQVTGGQEKVKQKLWLIFEGFSGTNQASWNFGQPAGGRKPNSGDALKGPKSRVTYETVVFHFGLRLLSAVIERHNLKQQRQTMAYMKRRAAARKKWARSGKKCSRMRNEVEKIKPKWHKDPRWFDIVKEGEPSIVGISSAGFAIYIVEEPNFPRQDPLEIEYAISIWFRRDRSQYLTFKKIQKAEKLKELQYNPIPFRLKQEKTSLVFESGDIKFGSRGSIEHFRDEARGKPPKADMDNNRRLTMFSVFSGNLTNLTEEQYARPVSGLLAPDEKRMPTLLKKLQDFFTPIHEKYGERIKQRLANSEASKRPFKKLEEYLPAIYLEFRARREGLASNWVLVLINSVRTLVRIKSEDPYIEFKVSQYLLEKEDNKAL

SEQ ID NO: 188 - protein, 449 aa, synthetic construct
KQDALFEERLKKAIFIKRQADPLQREELSLLPPNRKIVTGGHESAKDTLKQILRAINGTNQASWNPGTPSGKRDSKSADALAGPKSRVKLETVVFHVGHRLLKKVVEYQGHQKQQHGLKAFMRTCAAMRKKWKRSGKVVGELREQLANIQPKWHYDSRPLNLCFEGKPSVVGLRSAGIALYTIQKSVVPVKEPKPIEYAVSIWFRGPKAMDREDRCLEFKKLKIATELRKLQFEPIVSTLTQGIKGFSLYIQGNSVKFGSRGPIKYFSNESVRQRPPKADPDGNKRLALFSKFSGDLSDLTEEQWNRPILAFEGIIRRATLGNIQDYLTVGHEQFAISLEQLLSEKESVLQMSIEQQRLKKNLGKKAENEWVESFGAEQARKKAQGIREYISGFFQEYCSQREQWAENWVQQLNKSVRLFLTIQDSTPFIEFRVARYLPKGEKKKGKAM

SEQ ID NO: 189 - protein, 711 aa, synthetic construct
ANHAERHKRLRKEANRAANRNRPLVADCDTGDPLVGICRLLRRGDKMQPNKTGCRSCEQVEPELRDAILVSGPGRLDNYKYELFQRGRAMAVHRLLKRVPKLNRPKKAAGNDEKKAENKKSEIQKEKQKQRRMMPAVSMKQVSVADFKHVIENTVRHLFGDRRDREIAECAALRAASKYFLKSRRVRPRKLPKLANPDHGKELKGLRLREKRAKLKKEKEKQAELARSNQKGAVLHVATLKKDAPPMPYEKTQGRNDYTTFVISAAIKVGATRGTKPLLTPQPREWQCSLYWRDGQRWIRGGLLGLQAGIVLGPKLNRELLEAVLQRPIECRMSGCGNPLQVRGAAVDFFMTTNPFYVSGAAYAQKKFKPFGTKRASEDGAAAKAREKLMTQLAKVLDKVVTQAAHSPLDGIWETRPEAKLRAMIMALEHEWIFLRPGPCHNAAEEVIKCDCTGGHAILWALIDEARGALEHKEFYAVTRAHTHDCEKQKLGGRLAGFLDLLIAQDVPLDDAPAARKIKTLLEATPPAPCYKAATSIATCDCEGKFDKLWAIIDATRAGHGTEDLWARTLAYPQNVNCKCKAGKDLTHRLADFLGLLIKRDGPFRERPPHKVTGDRKLVFSGDKKCKGHQYVILAKAHNEEVVRAWISRWGLKSRTNKAGYAATELNLLLNWLSICRRRWMDMLTVQRDTPYIRMKTGRLVVDDKKERKAM

SEQ ID NO: 190 - protein, 574 aa, synthetic construct
AKQREALRVALERGIVRASNRTYTLVTNCTKGGPLPEQCRMIERGKARAMKWEPKLVGCGSCAAATVDLPAIEEYAQPGRLDVAKYKLTTQILAMATRRMMVRAAKLSRRKGQWPAKVQEEKEEPPEPKKMLKAVEMRPVAIVDFNRVIQTTIEHLWAERANADEAELKALKAAAAYFGPSLKIRARGPPKAAIGRELKKAHRKKAYAERKKARRKRAELARSQARGAAAHAAIRERDIPPMAYERTQGRNDVTTIPIAAAIKIAATRGARPLPAPKPMKWQCSLYWNEGQRWIRGGMLTAQAYAHAANIHRPMRCEMWGVGNPLKVRAFEGRVADPDGAKGRKAEFRLQTNAFYVSGAAYRNKKFKPFGTDRGGIGSARKKRERLMAQLAKILDKVVSQAAHSPLDDIWHTRPAQKLRAMIKQLEHEWMFLRPQAPTVEGTKPDVDVAGNMQRQIKALMAPDLPPIEKGSPAKRFTGDKRKKGERAVRVAEAHSDEVVTAWISRWGIQTRRNEGSYAAQELELLLNWLQICRRRWLDMTAAQRVSPYIRMKSGRMITDAADEGVAPIPLVENM

SEQ ID NO: 191 - protein, 743 aa, synthetic construct
KSISGRSIKHMACLKDMLKSEITEIEEKQKKESLRKWDYYSKFSDEILFRRNLNVSANHDANACYGCNPCAFLKEVYGFRIERRNNERIISYRRGLAGCKSCVQSTGYPPIEFVRRKFGADKAMEIVREVLHRRNWGALARNIGREKEADPILGELNELLLVDARPYFGNKSAANETNLAFNVITRAAKKFRDEGMYDIHKQLDIHSEEGKVPKGRKSRLIRIERKHKAIHGLDPGETWRYPHCGKGEKYGVWLNRSRLIHIKGNEYRCLTAFGTTGRRMSLDVACSVLGHPLVKKKRKKGKKTVDGTELWQIKKATETLPEDPIDCTFYLYAAKPTKDPFILKVGSLKAPRWKKLHKDFFEYSDTEKTQGQEKGKRVVRRGKVPRILSLRPDAKFKVSIWDDPYNGKNKEGTLLRMELSGLDGAKKPLILKRYGEPNTKPKNFVFWRPHITPHPLTFTPKHDFGDPNKKTKRRRVFNREYYGHLNDLAKMEPNAKFFEDREVSNKKNPKAKNIRIQAKESLPNIVAKNGRWAAFDPNDSLWKLYLHWRGRRKTIKGGISQEFQEFKERLDLYKKHEDESEWKEKEKLWENHEKEWKKTLEIHGSIAEVSQRCVMQSMMGPLDGLVQKKDYVHIGQSSLKAADDAWTFSANRYKKATGPKWGKISVSNLLYDANQANAELISQSISKYLSKQKDNQGCEGRKMKFLIKIIEPLRENFVKHTRWLHEMTQKDCEVRAQFSRVSM

SEQ ID NO: 192 - protein, 769 aa, synthetic construct
FPSDVGADALKHVRMLQPRLTDEVRKVALTRAPSDRPALARFAAVAQDGLAFVRHLNVSANHDSNCTFPRDPRDPRRGPCEPNPCAFLREVWGFRIVARGNERALSYRRGLAGCKSCVQSTGFPSVPFHRIGADDCMRKLHEILKARNWRLLARNIGREREADPLLTELSEYLLVDARTYPDGAAPNSGRLAENVIKRAAKKFRDEGMRDIHAQLRVHSREGKVPKGRLQRLRRIERKHRAIHALDPGPSWEAEGSARAEVQGVAVYRSQLLRVGHHTQQIEPVGIVARTLFGVGRTDLDVAVSVLGAPLTKRKKGSKTLESTEDFRIAKARETRAEDKIEVAFVLYPTASLLRDEIPKDAFPAMRIDRFLLKVGSVQADREILLQDDYYRFGDAEVKAGKNKGRTVTRPVKVPRLQALRPDAKFRVNVWADPFGAGDSPGTLLRLEVSGVTRRSQPLRLLRYGQPSTQPANFLCWRPHRVPDPMTFTPRQKFGERRKNRRTRRPRVFERLYQVHIKHLAHLEPNRKWFEEARVSAQKWAKARAIRRKGAEDIPVVAPPAKRRWAALQPNAELWDLYAHDREARKRFRGGRAAEGEEFKPRLNLYLAHEPEAEWESKRDRWERYEKKWTAVLEEHSRMCAVADRTLPQFLSDPLGARMDDKDYAFVGKSALAVAEAFVEEGTVERAQGNCSITAKKKFASNASRKRLSVANLLDVSDKADRALVFQAVRQYVQRQAENGGVEGRRMAFLRKLLAPLRQNFVCHTRWLHM

SEQ ID NO: 193 - protein, 564 aa, synthetic construct
AARKKKRGKIGITVKAKEKSPPAAGPFMARKLVNVAANVDGVEVHLCVECEADAHGSASARLLGGCRSCTGSIGAEGRLMGSVDVDRERVIAEPVHTETERLGPDVKAFEAGTAESKYAIQRGLEYWGVDLISRNRARTVRKMEEADRPESSTMEKTSWDEIAIKTYSQAYHASENHLFWERQRRVRQHALALFRRARERNRGESPLQSTQRPAPLVLAALHAEAAAISGRARAEYVLRGPSANVRAAAADIDAKPLGHYKTPSPKVARGFPVKRDLLRARHRIVGLSRAYFKPSDVVRGTSDAIAHVAGRNIGVAGGKPKEIEKTFTLPFVAYWEDVDRVVHCSSFKADGPWVRDQRIKIRGVSSAVGTFSLYGLDVAWSKPTSFYIRCSDIRKKFHPKGFGPMKHWRQWAKELDRLTEQRASCVVRALQDDEELLQTMERGQRYYDVFSCAATHATRGEADPSGGCSRCELVSCGVAHKVTKKAKGDTGIEAVAVAGCSLCESKLVGPSKPRVHRQMAALRQSHALNYLRRLQREWEALEAVQAPTPYLRFKYARHLEVRSM

SEQ ID NO: 194 - protein, 565 aa, synthetic construct
AAKKKKQRGKIGISVKPKEGSAPPADGPFMARKLVNVAANVDGVEVNLCIECEADAHGSAPARLLGGCKSCTGSIGAEGRLMGSVDVDRADAIAKPVNTETEKLGPDVQAFEAGTAETKYALQRGLEYWGVDLISRNRSRTVRRTEEGQPESATMEKTSWDEIAIKSYTRAYHASENHLFWERQRRVRQHALALFKRAKERNRGDSTLPREPGHGLVAIAALACEAYAVGGRNLAETVVRGPTFGTARAVRDVEIASLGRYKTPSPKVAHGSPVKRDFLRARHRIVGLARAYYRPSDVVRGTSDAIAHVAGRNIGVAGGKPRAVEAVFTLPFVAYWEDVDRVVHCSSFQVSAPWNRDQRMKIAGVTTAAGTFSLHGGELKWAKPTSFYIRCSDTRRKFRPKGFGPMKRWRQWAKDLDRLVEQRASCVVRALQDDAALLETMERGQRYYDVFACAVTHATRGEADRLAGCSRCALTPCQEAHRVTTKPRGDAGVEQVQTSDCSLCEGKLVGPSKPRLHRTLTLLRQEHGLNYLRRLQREWESLEAVQVPTPYLRFKYARHLEVRSM

SEQ ID NO: 195 - protein, 499 aa, synthetic construct
TDSQSESVPEVVYALTGGEVPGRVPPDGGSAEGARNAPTGLRKQRGKIKISAKPSKPGSPASSLARTLVNEAANVDGVQSSGCATCRMRANGSAPRALPIGCVACASSIGRAPQEETVCALPTTQGPDVRLLEGGHALRKYDIQRALEYWGVDLIGRNLDRQAGRGMEPAEGATATMKRVSMDELAVLDFGKSYYASEQHLFAARQRRVRQHAKALKIRAKHANRSGSVKRALDRSRKQVTALAREFFKPSDVVRGDSDALAHVVGRNLGVSRHPAREIPQTFTLPLCAYWEDVDRVISCSSLLAGEPFARDQEIRIEGVSSALGSLRLYRGAIEWHKPTSLYIRCSDTRRKFRPRGGLKKRWRQWAKDLDRLVEQRACCIVRSLQADVELLQTMERAQRFYDVHDCAATHVGPVAVRCSPCAGKQFDWDRYRLLAALRQEHALNYLRRLQREWESLEAQQVKMPYLRFKYARKLEVSGPLIGLEVRREPSMGTAIAEM

SEQ ID NO: 196 - protein, 358 aa, synthetic construct
AGTAGRRHGSLGARRSINIAGVTDRHGRWGCESCVYTRDQAGNRARCAPCDQSTYAPDVQEVTIGQRQAKYTIFLTLQSFSWTNTMRNNKRAAAGRSKRTTGKRIGQLAEIKITGVGLAHAHNVIQRSLQHNITKMWRAEKGKSKRVARLKKAKQLTKRRAYFRRRMSRQSRGNGFFRTGKGGIHAVAPVKIGLDVGMIASGSSEPADEQTVTLDAIWKGRKKKIRLIGAKGELAVAACRFREQQTKGDKCIPLILQDGEVRWNQNNWQCHPKKLVPLCGLEVSRKFVSQADRLAQNKVASPLAARFDKTSVKGTLVESDFAAVLVNVTSIYQQCHAMLLRSQEPTPSLRVQRTITSM

SEQ ID NO: 197 - protein, 369 aa, synthetic construct
GVRFSPAQSQVFFRTVIPQSVEARFAINMAAIHDAAGAFGCSVCRFEDRTPRNAKAVHGCSPCTRSTNRPDVFVLPVGAIKAKYDVFMRLLGFNWTHLNRRQAKRVTVRDRIGQLDELAISMLTGKAKAVLKKSICHNVDKSFKAMRGSLKKLHRKASKTGKSQLRAKLSDLRERTNTTQEGSHVEGDSDVALNKIGLDVGLVGKPDYPSEESVEVVVCLYFVGKVLILDAQGRIRDMRAKQYDGFKIPIIQRGQLTVLSVKDLGKWSLVRQDYVLAGDLRFEPKISKDRKYAECVKRIALITLQASLGFKERIPYYVTKQVEIKNASHIAFVTEAIQNCAENFREMTEYLMKYQEKSPDLKVLLTQLM

SEQ ID NO: 198 - protein, 486 aa, synthetic construct
RAVVGKVFLEQARRALNLATNFGTNHRTGCNGCYVTPGKLSIPQDGEKNAAGCTSCLMKATASYVSYPKPLGEKVAKYSTLDALKGFPWYSLRLNLRPNYRGKPINGVQEVAPVSKFRLAEEVIQAVQRYHFTELEQSFPGGRRRLRELRAFYTKEYRRAPEQRQHVVNGDRNIVVVTVLHELGFSVGMFNEVELLPKTPIECAVNVFIRGNRVLLEVRKPQFDKERLLVESLWKKDSRRHTAKWTPPNNEGRIFTAEGWKDFQLPLLLGSTSRSLRAIEKEGFVQLAPGRDPDYNNTIDEQHSGRPFLPLYLYLQGTISQEYCVFAGTWVIPFQDGISPYSTKDTFQPDLKRKAYSLLLDAVKHRLGNKVASGLQYGRFPAIEELKRLVRMHGATRKIPRGEKDLLKKGDPDTPEWWLLEQYPEFWRLCDAAAKRVSQNVGLLLSLKKQPLWQRRWLESRTRNEPLDNLPLSMALTLHLTNEEAL

SEQ ID NO: 199 - protein, 400 aa, synthetic construct
AAVYSKFYIENHFKMGIPETLSRIRGPSIIQGFSVNENYINIAGVGDRDFIFGCKKCKYTRGKPSSKKINKCHPCKRSTYPEPVIDVRGSISEFKYKIYNKLKQEPNQSIKQNTKGRMNPSDHTSSNDGIIINGIDNRIAYNVIFSSYKHLMEKQINLLRDTTKRKARQIKKYNNSGKKKHSLRSQTKGNLKNRYHMLGMFKKGSLTITNEGDFITAVRKVGLDISLYKNESLNKQEVETELCLNIKWGRTKSYTVSGYIPLPINIDWKLYLFEKETGLTLRLFGNKYKIQSKKFLIAQLFKPKRPPCADPVVKKAQKWSALNAHVQQMAGLFSDSHLLKRELKNRMHKQLDFKSLWVGTEDYIKWFEELSRSYVEGAEKSLEFFRQDYFCFNYTKQTTM

SEQ ID NO: 200 - protein, 666 aa, synthetic construct
PQQQRDLMLMAANYDQDYGNGCGPCTVVASAAYRPDPQAQHGCKRHLRTLGASAVTHVGLGDRTATITALHRLRGPAALAARARAAQAASAPMTPDTDAPDDRRRLEAIDADDVVLVGAHRALWSAVRRWADDRRAALRRRLHSEREWLLKDQIRWAELYTLIEASGTPPQGRWRNTLGALRGQSRWRRVLAPTMRATCAETHAELWDALAELVPEMAKDRRGLLRPPVEADALWRAPMIVEGWRGGHSVVVDAVAPPLDLPQPCAWTAVRLSGDPRQRWGLHLAVPPLGQVQPPDPLKATLAVSMRHRGGVRVRTLQAMAVDADAPMQRHLQVPLTLQRGGGLQWGIHSRGVRRREARSMASWEGPPIWTGLQLVNRWKGQGSALLAPDRPPDTPPYAPDAAVAPAQPDTKRARRTLKEACTVCRCAPGHMRQLQVTLTGDGTWRRFRLRAPQGAKRKAEVLKVATQHDERIANYTAWYLKRPEHAAGCDTCDGDSRLDGACRGCRPLLVGDQCFRRYLDKIEADRDDGLAQIKPKAQEAVAAMAAKRDARAQKVAARAAKLSEATGQRTAATRDASHEARAQKELEAVATEGTTVRHDAAAVSAFGSWVARKGDEYRHQVGVLANRLEHGLRLQELMAPDSVVADQQRASGHARVGYRYVLTAM

SEQ ID NO: 201 - protein, 560 aa, synthetic construct
AVAHPVGRGNAGSPGARGPEELPRQLVNRASNVTRPATYGCAPCRHVRLSIPKPVLTGCRACEQTTHPAPKRAVRGGADAAKYDLAAFFAGWAADLEGRNRRRQVHAPLDPQPDPNHEPAVTLQKIDLAEVSIEEFQRVLARSVKHRHDGRASREREKARAYAQVAKKRRNSHAHGARTRRAVRRQTRAVRRAHRMGANSGEILVASGAEDPVPEAIDHAAQLRRRIRACARDLEGLRHLSRRYLKTLEKPCRRPRAPDLGRARCHALVESLQAAERELEELRRCDSPDTAMRRLDAVLAAAASTDATFATGWTVVGMDLGVAPRGSAAPEVSPMEMAISVFWRKGSRRVIVSKPIAGMPIRRHELIRLEGLGTLRLDGNHYTGAGVTKGRGLSEGTEPDFREKSPSTLGFTLSDYRHESRWRPYGAKQGKTARQFFAAMSRELRALVEHQVLAPMGPPLLEAHERRFETLLKGQDNKSIHAGGGGRYVWRGPPDSKKRPAADGDWFRFGRGHADHRGWANKRHELAANYLQSAFRLWSTLAEAQEPTPYARYKYTRVTM

SEQ ID NO: 202 - protein, 404 aa, synthetic construct
WDFLTLQVYERHTSPEVCVAGNSTKCASGTRKSDHTHGVGVKLGAQEINVSANDDRDHEVGCNICVISRVSLDIKGWRYGCESCVQSTPEWRSIVRFDRNHKEAKGECLSRFEYWGAQSIARSLKRNKLMGGVNLDELAIVQNENVVKTSLKHLFDKRKDRIQANLKAVKVRMRERRKSGRQRKALRRQCRKLKRYLRSYDPSDIKEGNSCSAFTKLGLDIGISPNKPPKIEPKVEVVFSLFYQGACDKIVTVSSPESPLPRSWKIKIDGIRALYVKSTKVKFGGRTFRAGQRNNRRKVRPPNVKKGKRKGSRSQFFNKFAVGLDAVSQQLPIASVQGLWGRAETKKAQTICLKQLESNKPLKESQRCLFLADNWVVRVCGFLRALSQRQGPTPYIRYRYRCNM

SEQ ID NO: 203 - protein, 392 aa, synthetic construct
ARNVGQRNASRQSKRESAKARSRRVTGGHASVTQGVALINAAANADRDHTTGCEPCTWERVNLPLQEVIHGCDSCTKSSPFWRDIKVVNKGYREAKEEIMRIASGISADHLSRALSHNKVMGRLNLDEVCILDFRTVLDTSLKHLTDSRSNGIKEHIRAVHRKIRMRRKSGKTARALRKQYFALRRQWKAGHKPNSIREGNSLTALRAVGFDVGVSEGTEPMPAPQTEVVLSVFYKGSATRILRISSPHPIAKRSWKVKIAGIKALKLIRREHDFSFGRETYNASQRAEKRKFSPHAARKDFFNSFAVQLDRLAQQLCVSSVENLWVTEPQQKLLTLAKDTAPYGIREGARFADTRARLAWNWVFRVCGFTRALHQEQEPTPYCRFTWRSKM

SEQ ID NO: 204 - DNA, 36 bp, synthetic construct
  source 1..36: mol_type = other DNA
ggagagatctcaaacgattgctcgattagtcgagac

SEQ ID NO: 205 - DNA, 36 bp, synthetic construct
  source 1..36: mol_type = other DNA
gtcggaacgctcaacgattgcccctcacgaggggac

SEQ ID NO: 206 - DNA, 36 bp, synthetic construct
  source 1..36: mol_type = other DNA
accaaaacgactattgattgcccagtacgctgggac

SEQ ID NO: 207 - DNA, 37 bp, synthetic construct
  source 1..37: mol_type = other DNA
ggatccaatcctttttgattgcccaattcgttgggac

SEQ ID NO: 208 - DNA, 36 bp, synthetic construct
  source 1..36: mol_type = other DNA
ggatctgaggatcattattgctcgttacgacgagac

SEQ ID NO: 209 - DNA, 36 bp, synthetic construct
  source 1..36: mol_type = other DNA
cctgcgaaaccttttgattgctcagtacgctgagac

SEQ ID NO: 210 - DNA, 36 bp, synthetic construct
  source 1..36: mol_type = other DNA
ctttcaagactaatagattgctccttacgaggagac

SEQ ID NO: 211 - DNA, 36 bp, synthetic construct
  source 1..36: mol_type = other DNA
gtagaagacctcgctgattgctcggtgcgccgagac

SEQ ID NO: 212 - DNA, 36 bp, synthetic construct
  source 1..36: mol_type = other DNA
atggcaacagactctcattgcgcggtacgccgcgac

SEQ ID NO: 213 - DNA, 34 bp, synthetic construct
  source 1..34: mol_type = other DNA
gtcgctctctaacgcttgcccagtacgctgggac

SEQ ID NO: 214 - DNA, 36 bp, synthetic construct
  source 1..36: mol_type = other DNA
gctggaagactcaatgatggctccttacgaggagac

SEQ ID NO: 215 - DNA, 37 bp, synthetic construct
  source 1..37: mol_type = other DNA
ggttgaaccctcaacagattgctcggtaagccgagac

SEQ ID NO: 216 - DNA, 36 bp, synthetic construct
  source 1..36: mol_type = other DNA
cttgaaatcctgtcagattgctcccttcggggagac

SEQ ID NO: 217 - DNA, 36 bp, synthetic construct
  source 1..36: mol_type = other DNA
ctaggaacgcacgcagattgctcggtacgccgagac

SEQ ID NO: 218 - DNA, 36 bp, synthetic construct
  source 1..36: mol_type = other DNA
attgcaacgcctaaagattgctcgatacgtcgagac

SEQ ID NO: 219 - DNA, 36 bp, synthetic construct
  source 1..36: mol_type = other DNA
gttcggcraycctttgattgctcagtacgctgagac

SEQ ID NO: 220 - DNA, 36 bp, synthetic construct
  source 1..36: mol_type = other DNA
gttgaacctagatcagatggctcagtacgctgagac

SEQ ID NO: 221 - DNA, 36 bp, synthetic construct
  source 1..36: mol_type = other DNA
ccctcaacacgtcagaaatgcccggcacgccgggac

SEQ ID NO: 222 - DNA, 36 bp, synthetic construct
  source 1..36: mol_type = other DNA
gtcgcaagactcgaataattgcccctctatggggac

SEQ ID NO: 223 - DNA, 37 bp, synthetic construct
  source 1..37: mol_type = other DNA
gctggggaccgatcctgattgctcgctgcggcgagac

SEQ ID NO: 224 - DNA, 36 bp, synthetic construct
  source 1..36: mol_type = other DNA
ctctcaatggataacgattgctctctacggagagac

SEQ ID NO: 225 - DNA, 36 bp, synthetic construct
  source 1..36: mol_type = other DNA
gttgaaccctcaacagattgctcggtaagccgagac

SEQ ID NO: 226 - DNA, 36 bp, synthetic construct
  source 1..36: mol_type = other DNA
actgaaaccaccaacgattgcgctcctcggagcgac

SEQ ID NO: 227 - DNA, 20 bp, synthetic construct
  source 1..20: mol_type = other DNA
tggatatctgtgggacaaga

SEQ ID NO: 228 - DNA, 20 bp, synthetic construct
  source 1..20: mol_type = other DNA
tcccacagatatccagaacc

SEQ ID NO: 229 - DNA, 20 bp, synthetic construct
  source 1..20: mol_type = other DNA
gagtctctcagctggtacac

SEQ ID NO: 230 - DNA, 20 bp, synthetic construct
  source 1..20: mol_type = other DNA
agagtctctcagctggtaca

SEQ ID NO: 231 - DNA, 20 bp, synthetic construct
  source 1..20: mol_type = other DNA
tcactggatttagagtctct

SEQ ID NO: 232 - DNA, 20 bp, synthetic construct
  source 1..20: mol_type = other DNA
agaatcaaaatcggtgaata

SEQ ID NO: 233 - DNA, 20 bp, synthetic construct
  source 1..20: mol_type = other DNA
gagaatcaaaatcggtgaat

SEQ ID NO: 234 - DNA, 20 bp, synthetic construct
  source 1..20: mol_type = other DNA
accgattttgattctcaaac

SEQ ID NO: 235 - DNA, 20 bp, synthetic construct
  source 1..20: mol_type = other DNA
tttgagaatcaaaatcggtg

SEQ ID NO: 236 - DNA, 20 bp, synthetic construct
  source 1..20: mol_type = other DNA
gtttgagaatcaaaatcggt

SEQ ID NO: 237 - DNA, 20 bp, synthetic construct
  source 1..20: mol_type = other DNA
tgattctcaaacaaatgtgt

SEQ ID NO: 238 - DNA, 20 bp, synthetic construct
  source 1..20: mol_type = other DNA
gattctcaaacaaatgtgtc

SEQ ID NO: 239 - DNA, 20 bp, synthetic construct
  source 1..20: mol_type = other DNA
attctcaaacaaatgtgtca

SEQ ID NO: 240 - DNA, 20 bp, synthetic construct
  source 1..20: mol_type = other DNA
tgacacatttgtttgagaat

SEQ ID NO: 241 - DNA, 20 bp, synthetic construct
  source 1..20: mol_type = other DNA
tcaaacaaatgtgtcacaaa

SEQ ID NO: 242 - DNA, 20 bp, synthetic construct
  source 1..20: mol_type = other DNA
gtgacacatttgtttgagaa

SEQ ID NO: 243 - DNA, 20 bp, synthetic construct
  source 1..20: mol_type = other DNA
ctttgtgacacatttgtttg

SEQ ID NO: 244 - DNA, 20 bp, synthetic construct
  source 1..20: mol_type = other DNA
tgatgtgtatatcacagaca

SEQ ID NO: 245 - DNA, 20 bp, synthetic construct
  source 1..20: mol_type = other DNA
tctgtgatatacacatcaga

SEQ ID NO: 246 - DNA, 20 bp, synthetic construct
  source 1..20: mol_type = other DNA
gtctgtgatatacacatcag

SEQ ID NO: 247 - DNA, 20 bp, synthetic construct
  source 1..20: mol_type = other DNA
tgtctgtgatatacacatca

SEQ ID NO: 248 - DNA, 20 bp, synthetic construct
  source 1..20: mol_type = other DNA
aagtccatagacctcatgtc

SEQ ID NO: 249 - DNA, 20 bp, synthetic construct
  source 1..20: mol_type = other DNA
ctcttgaagtccatagacct

SEQ ID NO: 250 - DNA, 20 bp, synthetic construct
  source 1..20: mol_type = other DNA
aagagcaacagtgctgtggc

SEQ ID NO: 251 - DNA, 20 bp, synthetic construct
  source 1..20: mol_type = other DNA
ctccaggccacagcactgtt

SEQ ID NO: 252 - DNA, 20 bp, synthetic construct
  source 1..20: mol_type = other DNA
ttgctccaggccacagcact

SEQ ID NO: 253 - DNA, 20 bp, synthetic construct
  source 1..20: mol_type = other DNA
gttgctccaggccacagcac

SEQ ID NO: 254 - DNA, 20 bp, synthetic construct
  source 1..20: mol_type = other DNA
cacatgcaaagtcagatttg

SEQ ID NO: 255 - DNA, 20 bp, synthetic construct
  source 1..20: mol_type = other DNA
gcacatgcaaagtcagattt

SEQ ID NO: 256 - DNA, 20 bp, synthetic construct
  source 1..20: mol_type = other DNA
gcatgtgcaaacgccttcaa

SEQ ID NO: 257 - DNA, 20 bp, synthetic construct
  source 1..20: mol_type = other DNA
aaggcgtttgcacatgcaaa

SEQ ID NO: 258 - DNA, 20 bp, synthetic construct
  source 1..20: mol_type = other DNA
catgtgcaaacgccttcaac

SEQ ID NO: 259 - DNA, 20 bp, synthetic construct
  source 1..20: mol_type = other DNA
ttgaaggcgtttgcacatgc

SEQ ID NO: 260 - DNA, 20 bp, synthetic construct
  source 1..20: mol_type = other DNA
aacaacagcattattccaga

SEQ ID NO: 261 - DNA, 20 bp, synthetic construct
  source 1..20: mol_type = other DNA
tggaataatgctgttgttga

SEQ ID NO: 262 - DNA, 20 bp, synthetic construct
  source 1..20: mol_type = other DNA
ttccagaagacaccttcttc

SEQ ID NO: 263 - DNA, 20 bp, synthetic construct
  source 1..20: mol_type = other DNA
cagaagacaccttcttcccc

SEQ ID NO: 264 - DNA, 20 bp, synthetic construct
  source 1..20: mol_type = other DNA
cctgggctggggaagaaggt

SEQ ID NO: 265 - DNA, 20 bp, synthetic construct
  source 1..20: mol_type = other DNA
ttccccagcccaggtaaggg

SEQ ID NO: 266 - DNA, 20 bp, synthetic construct
  source 1..20: mol_type = other DNA
cccagcccaggtaagggcag

SEQ ID NO: 267 - DNA, 20 bp, synthetic construct
  source 1..20: mol_type = other DNA
taaaaggaaaaacagacatt

SEQ ID NO: 268 - DNA, 20 bp, synthetic construct
  source 1..20: mol_type = other DNA
ctaaaaggaaaaacagacat

SEQ ID NO: 269 - DNA, 20 bp, synthetic construct
  source 1..20: mol_type = other DNA
ttccttttagaaagttcctg

SEQ ID NO: 270 - DNA, 20 bp, synthetic construct
  source 1..20: mol_type = other DNA
tccttttagaaagttcctgt

SEQ ID NO: 271 - DNA, 20 bp, synthetic construct
  source 1..20: mol_type = other DNA
ccttttagaaagttcctgtg

SEQ ID NO: 272 - DNA, 20 bp, synthetic construct
  source 1..20: mol_type = other DNA
cttttagaaagttcctgtga

SEQ ID NO: 273 - DNA, 20 bp, synthetic construct
  source 1..20: mol_type = other DNA
tagaaagttcctgtgatgtc

SEQ ID NO: 274 - DNA, 20 bp, synthetic construct
  source 1..20: mol_type = other DNA
agaaagttcctgtgatgtca

SEQ ID NO: 275 - DNA, 20 bp, synthetic construct
  source 1..20: mol_type = other DNA
gaaagttcctgtgatgtcaa

SEQ ID NO: 276 - DNA, 20 bp, synthetic construct
  source 1..20: mol_type = other DNA
acatcacaggaactttctaa

SEQ ID NO: 277 - DNA, 20 bp, synthetic construct
  source 1..20: mol_type = other DNA
ctgtgatgtcaagctggtcg

SEQ ID NO: 278 - DNA, 20 bp, synthetic construct
  source 1..20: mol_type = other DNA
tcgaccagcttgacatcaca

SEQ ID NO: 279 - DNA, 20 bp, synthetic construct
  source 1..20: mol_type = other DNA
ctcgaccagcttgacatcac

SEQ ID NO: 280 - DNA, 20 bp, synthetic construct
  source 1..20: mol_type = other DNA
tctcgaccagcttgacatca

SEQ ID NO: 281 - DNA, 20 bp, synthetic construct
  source 1..20: mol_type = other DNA
aaagcttttctcgaccagct

SEQ ID NO: 282 - DNA, 20 bp, synthetic construct
  source 1..20: mol_type = other DNA
caaagcttttctcgaccagc

SEQ ID NO: 283 - DNA, 20 bp, synthetic construct
  source 1..20: mol_type = other DNA
cctgtttcaaagcttttctc

SEQ ID NO: 284 - DNA, 20 bp, synthetic construct
  source 1..20: mol_type = other DNA
gaaacaggtaagacaggggt

SEQ ID NO: 285 - DNA, 20 bp, synthetic construct
  source 1..20: mol_type = other DNA
aaacaggtaagacaggggtc

SEQ ID NO: 286 - DNA, 20 bp, synthetic construct
  source 1..20: mol_type = other DNA
aatataagtggaggcgtcgc

SEQ ID NO: 287 - DNA, 20 bp, synthetic construct
  source 1..20: mol_type = other DNA
atataagtggaggcgtcgcg

SEQ ID NO: 288 - DNA, 20 bp, synthetic construct
  source 1..20: mol_type = other DNA
aggaatgcccgccagcgcga

SEQ ID NO: 289 - DNA, 20 bp, synthetic construct
  source 1..20: mol_type = other DNA
ctgaagctgacagcattcgg

SEQ ID NO: 290 - DNA, 20 bp, synthetic construct
  source 1..20: mol_type = other DNA
gggccgagatgtctcgctcc

SEQ ID NO: 291 - DNA, 20 bp, synthetic construct
  source 1..20: mol_type = other DNA
gctgtgctcgcgctactctc

SEQ ID NO: 292 - DNA, 20 bp, synthetic construct
  source 1..20: mol_type = other DNA
ctggcctggaggctatccag

SEQ ID NO: 293 - DNA, 20 bp, synthetic construct
  source 1..20: mol_type = other DNA
tggcctggaggctatccagc

SEQ ID NO: 294 - DNA, 20 bp, synthetic construct
  source 1..20: mol_type = other DNA
atgtgtcttttcccgatatt

SEQ ID NO: 295 - DNA, 20 bp, synthetic construct
  source 1..20: mol_type = other DNA
tcccgatattcctcaggtac

SEQ ID NO: 296 - DNA, 20 bp, synthetic construct
  source 1..20: mol_type = other DNA
cccgatattcctcaggtact

SEQ ID NO: 297 - DNA, 20 bp, synthetic construct
  source 1..20: mol_type = other DNA
ccgatattcctcaggtactc

SEQ ID NO: 298 - DNA, 20 bp, synthetic construct
  source 1..20: mol_type = other DNA
gagtacctgaggaatatcgg

SEQ ID NO: 299 - DNA, 20 bp, synthetic construct
  source 1..20: mol_type = other DNA
ggagtacctgaggaatatcg

SEQ ID NO: 300 - DNA, 20 bp, synthetic construct
  source 1..20: mol_type = other DNA
ctcaggtactccaaagattc

SEQ ID NO: 301 - DNA, 20 bp, synthetic construct
  source 1..20: mol_type = other DNA
aggtttactcacgtcatcca

SEQ ID NO: 302 - DNA, 20 bp, synthetic construct
  source 1..20: mol_type = other DNA
actcacgtcatccagcagag

SEQ ID NO: 303 - DNA, 20 bp, synthetic construct
  source 1..20: mol_type = other DNA
ctcacgtcatccagcagaga

SEQ ID NO: 304 - DNA, 20 bp, synthetic construct
  source 1..20: mol_type = other DNA
tctgctggatgacgtgagta

SEQ ID NO: 305 - DNA, 20 bp, synthetic construct
  source 1..20: mol_type = other DNA
cattctctgctggatgacgt

SEQ ID NO: 306 - DNA, 20 bp, synthetic construct
  source 1..20: mol_type = other DNA
ccattctctgctggatgacg

SEQ ID NO: 307 - DNA, 20 bp, synthetic construct
  source 1..20: mol_type = other DNA
actttccattctctgctgga

SEQ ID NO: 308 - DNA, 20 bp, synthetic construct
  source 1..20: mol_type = other DNA
gactttccattctctgctgg

SEQ ID NO: 309 - DNA, 20 bp, synthetic construct
  source 1..20: mol_type = other DNA
aggaaatttgactttccatt

SEQ ID NO: 310 - DNA, 20 bp, synthetic construct
  source 1..20: mol_type = other DNA
cctgaattgctatgtgtctg

SEQ ID NO: 311 - DNA, 20 bp, synthetic construct
  source 1..20: mol_type = other DNA
ctgaattgctatgtgtctgg

SEQ ID NO: 312 - DNA, 20 bp, synthetic construct
  source 1..20: mol_type = other DNA
ctatgtgtctgggtttcatc

SEQ ID NO: 313 - DNA, 20 bp, synthetic construct
  source 1..20: mol_type = other DNA
aatgtcggatggatgaaacc

SEQ ID NO: 314 - DNA, 20 bp, synthetic construct
  source 1..20: mol_type = other DNA
catccatccgacattgaagt

SEQ ID NO: 315 - DNA, 20 bp, synthetic construct
  source 1..20: mol_type = other DNA
atccatccgacattgaagtt

SEQ ID NO: 316 - DNA, 20 bp, synthetic construct
  source 1..20: mol_type = other DNA
agtaagtcaacttcaatgtc

SEQ ID NO: 317 - DNA, 20 bp, synthetic construct
  source 1..20: mol_type = other DNA
ttcagtaagtcaacttcaat

SEQ ID NO: 318 - DNA, 20 bp, synthetic construct
  source 1..20: mol_type = other DNA
aagttgacttactgaagaat

SEQ ID NO: 319 - DNA, 20 bp, synthetic construct
  source 1..20: mol_type = other DNA
acttactgaagaatggagag

SEQ ID NO: 320 - DNA, 20 bp, synthetic construct
  source 1..20: mol_type = other DNA
tctctccattcttcagtaag

SEQ ID NO: 321 - DNA, 20 bp, synthetic construct
  source 1..20: mol_type = other DNA
ctgaagaatggagagagaat

SEQ ID NO: 322 - DNA, 20 bp, synthetic construct
  source 1..20: mol_type = other DNA
aattctctctccattcttca

SEQ ID NO: 323 - DNA, 20 bp, synthetic construct
  source 1..20: mol_type = other DNA
caattctctctccattcttc

SEQ ID NO: 324 - DNA, 20 bp, synthetic construct
  source 1..20: mol_type = other DNA
tcaattctctctccattctt

SEQ ID NO: 325 - DNA, 20 bp, synthetic construct
  source 1..20: mol_type = other DNA
ttcaattctctctccattct

SEQ ID NO: 326 - DNA, 20 bp, synthetic construct
  source 1..20: mol_type = other DNA
aaaaagtggagcattcagac

SEQ ID NO: 327 - DNA, 20 bp, synthetic construct
  source 1..20: mol_type = other DNA
ctgaaagacaagtctgaatg

SEQ ID NO: 328 - DNA, 20 bp, synthetic construct
  source 1..20: mol_type = other DNA
agacttgtctttcagcaagg

SEQ ID NO: 329 - DNA, 20 bp, synthetic construct
  source 1..20: mol_type = other DNA
tctttcagcaaggactggtc

SEQ ID NO: 330 - DNA, 20 bp, synthetic construct
  source 1..20: mol_type = other DNA
cagcaaggactggtctttct

SEQ ID NO: 331 - DNA, 20 bp, synthetic construct
  source 1..20: mol_type = other DNA
agcaaggactggtctttcta

SEQ ID NO: 332 - DNA, 20 bp, synthetic construct
  source 1..20: mol_type = other DNA
ctatctcttgtactacactg

SEQ ID NO: 333 - DNA, 20 bp, synthetic construct
  source 1..20: mol_type = other DNA
tatctcttgtactacactga

SEQ ID NO: 334 - DNA, 20 bp, synthetic construct
  source 1..20: mol_type = other DNA
agtgtagtacaagagataga

SEQ ID NO: 335 - DNA, 20 bp, synthetic construct
  source 1..20: mol_type = other DNA
tactacactgaattcacccc

SEQ ID NO: 336 - DNA, 20 bp, synthetic construct
  source 1..20: mol_type = other DNA
agtgggggtgaattcagtgt

SEQ ID NO: 337 - DNA, 20 bp, synthetic construct
  source 1..20: mol_type = other DNA
cagtgggggtgaattcagtg

SEQ ID NO: 338 - DNA, 20 bp, synthetic construct
  source 1..20: mol_type = other DNA
tcagtgggggtgaattcagt

SEQ ID NO: 339 - DNA, 20 bp, synthetic construct
  source 1..20: mol_type = other DNA
ttcagtgggggtgaattcag

SEQ ID NO: 340 - DNA, 20 bp, synthetic construct
  source 1..20: mol_type = other DNA
acccccactgaaaaagatga

SEQ ID NO: 341 - DNA, 20 bp, synthetic construct
  source 1..20: mol_type = other DNA
acacggcaggcatactcatc

SEQ ID NO: 342 - DNA, 20 bp, synthetic construct
  source 1..20: mol_type = other DNA
ggctgtgacaaagtcacatg

SEQ ID NO: 343 - DNA, 20 bp, synthetic construct
  source 1..20: mol_type = other DNA
gtcacagcccaagatagtta

SEQ ID NO: 344 - DNA, 20 bp, synthetic construct
  source 1..20: mol_type = other DNA
tcacagcccaagatagttaa

SEQ ID NO: 345 - DNA, 20 bp, synthetic construct
  source 1..20: mol_type = other DNA
actatcttgggctgtgacaa

SEQ ID NO: 346 - DNA, 20 bp, synthetic construct
  source 1..20: mol_type = other DNA
ccccacttaactatcttggg

SEQ ID NO: 347 - RNA, 53 nt, synthetic construct
  source 1..53: mol_type = other RNA
cgttgcagctcgcacgttggcactggttgaaggtattaaatactcgtattgct

SEQ ID NO: 348 - RNA, 52 nt, synthetic construct
  source 1..52: mol_type = other RNA
gttgcaactcacgcgcgtatgtggcttgaaggtattaaatactcgtattgct

SEQ ID NO: 349 - RNA, 52 nt, synthetic construct
  source 1..52: mol_type = other RNA
gttgcaattcatatctccgggtggattgaaggtattaaatactcgtattgct

SEQ ID NO: 350 - RNA, 52 nt, synthetic construct
  source 1..52: mol_type = other RNA
gttgcagcgtgcgcgagcgtgtggcttgaaggtattaaatactcgtattgct

SEQ ID NO: 351 - RNA, 52 nt, synthetic construct
  source 1..52: mol_type = other RNA
gttgcaactcgcacgtgaatgcgacttgaaggtattaaatactcgtattgct

SEQ ID NO: 352 - RNA, 52 nt, synthetic construct
  source 1..52: mol_type = other RNA
gatgcaactcgtgtgtatgtgcgagttgaaggtattaaatactcgtattgct

SEQ ID NO: 353 - RNA, 52 nt, synthetic construct
  source 1..52: mol_type = other RNA
gacgcaactcgcgcgcgggcatgtattgagggtattaaatactcgtattgct

SEQ ID NO: 354 - RNA, 52 nt, synthetic construct
  source 1..52: mol_type = other RNA
gatgcatctgacacagctgggtgagttgaaggtattaaatactcgtattgct

SEQ ID NO: 355 - RNA, 52 nt, synthetic construct
  source 1..52: mol_type = other RNA
gttgcaacacatgtatgtgggtgagttgaaggtattaaatactcgtattgct

SEQ ID NO: 356 - RNA, 52 nt, synthetic construct
  source 1..52: mol_type = other RNA
gttgcaatttgtatacgagtgtgacttgaaggtattaaatactcgtattgct

SEQ ID NO: 357 - RNA, 52 nt, synthetic construct
  source 1..52: mol_type = other RNA
gctgcaacacgcgcgggtacgcgggttgaaggtattaaatactcgtattgct

SEQ ID NO: 358 - RNA, 52 nt, synthetic construct
  source 1..52: mol_type = other RNA
gttgcaactcgcacgttggcactgattgaaggtattaaatactcgtattgct

SEQ ID NO: 359 - RNA, 56 nt, synthetic construct
  source 1..56: mol_type = other RNA
gctgtagccctgctcaaattgtagggcgcatgcaggtattaaatactcgtattgct

SEQ ID NO: 360 - RNA, 56 nt, synthetic construct
  source 1..56: mol_type = other RNA
gttgtagtcgacctgaatctgtggggtgcttacaggtattaaatactcgtattgct

SEQ ID NO: 361 - RNA, 56 nt, synthetic construct
  source 1..56: mol_type = other RNA
ggtgtatgtaaccgcaatttgaagggtgcatacaggtattaaatactcgtattgct

SEQ ID NO: 362 - RNA, 56 nt, synthetic construct
  source 1..56: mol_type = other RNA
gttggaatcgaccttaatttgaggtgtgcttacaggtattaaatactcgtattgct

SEQ ID NO: 363 - RNA, 56 nt, synthetic construct
  source 1..56: mol_type = other RNA
gctgaaagagcagagaatttgttgtgtgcatacaggtattaaatactcgtattgct

SEQ ID NO: 364 - RNA, 56 nt, synthetic construct
  source 1..56: mol_type = other RNA
gttggagtcggcttgaatctgcggggtgcttacaggtattaaatactcgtattgct

SEQ ID NO: 365 - RNA, 56 nt, synthetic construct
  source 1..56: mol_type = other RNA
gttgtaagagacccgaattttagctgtgtatacaggtattaaatactcgtattgct

SEQ ID NO: 366 - RNA, 56 nt, synthetic construct
  source 1..56: mol_type = other RNA
gttgtgaatgcaggcatttttgatggtaaatccaactattaaatactcgtattgct

SEQ ID NO: 367 - RNA, 56 nt, synthetic construct
  source 1..56: mol_type = other RNA
actgtcagacaatgcaaaatgtgtggtacatccaactattaaatactcgtattgct

SEQ ID NO: 368 - RNA, 56 nt, synthetic construct
  source 1..56: mol_type = other RNA
gctgtcagtagtagtaaaaatgggggtacatccaactattaaatactcgtattgct

SEQ ID NO: 369 - RNA, 56 nt, synthetic construct
  source 1..56: mol_type = other RNA
actgtcagtacatgcaaaaatgagggtacatccaactattaaatactcgtattgct

SEQ ID NO: 370 - RNA, 56 nt, synthetic construct
  source 1..56: mol_type = other RNA
actgtcagacaatgcaaaatgagtggtacatccaactattaaatactcgtattgct

SEQ ID NO: 371 - RNA, 56 nt, synthetic construct
  source 1..56: mol_type = other RNA
gctgttagaacatacaaaatgaaaggtacatccaactattaaatactcgtattgct

SEQ ID NO: 372 - RNA, 56 nt, synthetic construct
  source 1..56: mol_type = other RNA
gctgcatgtcatggcaaaaggaaaggtacatccaactattaaatactcgtattgct

SEQ ID NO: 373 - RNA, 56 nt, synthetic construct
  source 1..56: mol_type = other RNA
gctgtcagacacctaaaaaatgagggtacatccaactattaaatactcgtattgct

SEQ ID NO: 374 - RNA, 56 nt, synthetic construct
  source 1..56: mol_type = other RNA
gctgtgagtcacagtaaaaatgaaggtatatccaactattaaatactcgtattgct

SEQ ID NO: 375 - RNA, 56 nt, synthetic construct
  source 1..56: mol_type = other RNA
gatgtatatgctatgattttgtatggtacatccaactattaaatactcgtattgct

SEQ ID NO: 376 - RNA, 53 nt, synthetic construct
  source 1..53: mol_type = other RNA
gttgagctctgcattacgcagatgaatgacgagtattaaatactcgtattgct

SEQ ID NO: 377 - RNA, 52 nt, synthetic construct
  source 1..52: mol_type = other RNA
gatgcaacttagatgcatatgtaagttgtgagtattaaatactcgtattgct

SEQ ID NO: 378 - RNA, 52 nt, synthetic construct
  source 1..52: mol_type = other RNA
gttgcaatctgcgtacaggcgtaagatgtgagtattaaatactcgtattgct

SEQ ID NO: 379 - RNA, 52 nt, synthetic construct
  source 1..52: mol_type = other RNA
gatcatatctgcttgtatgggtatgctgcgagtattaaatactcgtattgct

SEQ ID NO: 380 - RNA, 52 nt, synthetic construct
  source 1..52: mol_type = other RNA
gttgcaacttacgcataggtgtaaaatacgagtattaaatactcgtattgct

SEQ ID NO: 381 - RNA, 52 nt, synthetic construct
  source 1..52: mol_type = other RNA
gattatatctgcttgtatgggtatactgcgagtattaaatactcgtattgct

SEQ ID NO: 382 - RNA, 58 nt, synthetic construct
  source 1..58: mol_type = other RNA
tcagctcacaacctacatatgcatacaagatatatcgttattaaatactcgtattgct

SEQ ID NO: 383 - RNA, 52 nt, synthetic construct
  source 1..52: mol_type = other RNA
gatatatcttgtatgcatatgtaggttgtgagtattaaatactcgtattgct

SEQ ID NO: 384 - RNA, 52 nt, synthetic construct
  source 1..52: mol_type = other RNA
gttgcaatgaacgtatgtgcatgaggtgtgagtattaaatactcgtattgct

SEQ ID NO: 385 - RNA, 82 nt, synthetic construct
  source 1..82: mol_type = other RNA
ggggcgtcttcccgtccctaaatcgagatagcagccatttttcttcatttttgaagacggtcttgcactcgaaaaggtcaag

SEQ ID NO: 386 - RNA, 84 nt, synthetic construct
  source 1..84: mol_type = other RNA
ggggcgacttcccgccccaaaatcgagaaagtgactgtcagactttgctatgcaaagcaagtaatacactcgagaaggtaaaga

SEQ ID NO: 387 - RNA, 83 nt, synthetic construct
  source 1..83: mol_type = other RNA
agggcgacttcccgtcctaaaatcgagaaagtgacaattcagtctcgcatttcgagcattgtaatacactcgaaaaggttaag

SEQ ID NO: 388 - RNA, 85 nt, synthetic construct
  source 1..85: mol_type = other RNA
ggggcgacttcccgtcccaaaatcgagaaagtggtcgtaagtctcgatcggatcgaagcagacaatacactcgaaaaggttaagt

SEQ ID NO: 389 - RNA, 82 nt, synthetic construct
  source 1..82: mol_type = other RNA
ggggcgacttcccgtccctaaatcgagaaagtggcggtaagacttcggtcttcgaagcgcgcaatacactcgaaaaggttaa

SEQ ID NO: 390 - RNA, 83 nt, synthetic construct
  source 1..83: mol_type = other RNA
ggggcgacttcccgtcccaaaatcgagaaagtgacagtaattctttgttttacagaggttgtaatacactcgataaggttaag

SEQ ID NO: 391 - RNA, 83 nt, synthetic construct
  source 1..83: mol_type = other RNA
ggggcgacctcccgtcccaaaatcgagaaagtggccgtcagacttctcgctgagaagcacgcaatacactcgaaaaggtaaag

SEQ ID NO: 392 - RNA, 83 nt, synthetic construct
  source 1..83: mol_type = other RNA
agggcgacttcccgtcctgaaatcgagaaagtgacaaggaaagcgcaattttgcgccgttgtaatacactcgagaaggtcaag

SEQ ID NO: 393 - RNA, 83 nt, synthetic construct
  source 1..83: mol_type = other RNA
agggcgacttcccgtcctaaaatcgagatagtgacaagtcagtctcttatgaggagcattgtaatacactcgagaaggtcaag

SEQ ID NO: 394 - RNA, 83 nt, synthetic construct
  source 1..83: mol_type = other RNA
agggcgacttcacgtcctcaaatcgagaaagtgagcgtaagacttggcttctgtcaagcggttaatacactcgagaaggttaa

SEQ ID NO: 395 - RNA, 83 nt, synthetic construct
  source 1..83: mol_type = other RNA
ggggcgacttcccgtcccgaaatcgagaaagtgaccgtcagactctgctttgcagagcaggtaatacactcgagaaggtaaag

SEQ ID NO: 396 - RNA, 83 nt, synthetic construct
  source 1..83: mol_type = other RNA
ggggcgtcttcccgtccctaaatcgagatagcagccatttttcttcattttttgaagacggtcttgcactcgaaaaggtcaag

SEQ ID NO: 397 - DNA, 135 bp, synthetic construct
  source 1..135: mol_type = other DNA
cacgctagctgaaaagcaaccgcgtacacgcggacgaacggccgacctgctcggcctgaaggttgagaaggttatgtataagaggagaaaatcccccttcataatcgctcaccaagctcccaatttacatatttt

SEQ ID NO: 398 - RNA, 97 nt, synthetic construct
  source 1..97: mol_type = other RNA
cggccgacctgctcggcctgaaggttgagaaggttatgtataagaggagaaaatcccccttcataatcgctcaccaagctcccaatttacatatttt

SEQ ID NO: 399 - DNA, 135 bp, synthetic construct
  source 1..135: mol_type = other DNA
tattgcgctagccataatggcaatcgcgtacaggcaactgaaggccgacctgtacggccttaaggttgagaaggcacatgtaagtggaaaaatgctttcccgttgtgttcgctcaccaagcacacacgttttttt

SEQ ID NO: 400 - RNA, 96 nt, synthetic construct
  source 1..96: mol_type = other RNA
gaaggccgacctgtacggccttaaggttgagaaggcacatgtaagtggaaaaatgctttcccgttgtgttcgctcaccaagcacacacgttttttt

SEQ ID NO: 401 - DNA, 137 bp, synthetic construct
  source 1..137: mol_type = other DNA
aggtcgccgtttacgttgcgtcacaagggcgcgcgggcgaccgaaggccgatctgtacggcctgcaggttgagaaggcacatattagaggaaaattgcttccctttgtgttcgctcaccgagtattccttgtttttt

SEQ ID NO: 402 - RNA, 87 nt, synthetic construct
  source 1..87: mol_type = other RNA
atctgtacggcctgcaggttgagaaggcacatattagaggaaaattgcttccctttgtgttcgctcaccgagtattccttgtttttt

SEQ ID NO: 403 - DNA, 138 bp, synthetic construct
  source 1..138: mol_type = other DNA
caatgtttcgctaacctttaaggtaatcgcgggcaggcgactgaaggccgacctgtacggccttaaggctgagaaggcacatgtaagtggaaaaatgctttcccgttgtgttcgctcaccaagcacatttgttttttt

SEQ ID NO: 404 - RNA, 96 nt, synthetic construct
  source 1..96: mol_type = other RNA
gaaggccgacctgtacggccttaaggctgagaaggcacatgtaagtggaaaaatgctttcccgttgtgttcgctcaccaagcacatttgttttttt

SEQ ID NO: 405 - DNA, 136 bp, synthetic construct
  source 1..136: mol_type = other DNA
aggccgttatcaacgtttcgcggaagagcggacgaacggctgaaggccgacctgtacggcctaaaggttgagaaggcacatgtaagaggaaaatcgcttccctttgtgttcgctcaccgggtacacgcgttttttt

SEQ ID NO: 406 - RNA, 93 nt, synthetic construct
  source 1..93: mol_type = other RNA
aggccgacctgtacggcctaaaggttgagaaggcacatgtaagaggaaaatcgcttccctttgtgttcgctcaccgggtacacgcgttttttt

SEQ ID NO: 407 - DNA, 142 bp, synthetic construct
  source 1..142: mol_type = other DNA
tcgtaaatgttgcgctagccataatggcaatcgcgtacaggcaactgaaggccgacctgtacggccttaaggttgagaaggcacatgtcagtggaaaaatgctttccctttgtgttcgctcaccaagcacacgcggtttttt

SEQ ID NO: 408 - RNA, 95 nt, synthetic construct
  source 1..95: mol_type = other RNA
aaggccgacctgtacggccttaaggttgagaaggcacatgtcagtggaaaaatgctttccctttgtgttcgctcaccaagcacacgcggtttttt

SEQ ID NO: 409 - DNA, 137 bp, synthetic construct
  source 1..137: mol_type = other DNA
aatgtttcgctaacctttaaggtaatcgcgggcaggcgactgaaggccgacctgtacggccttaaggctgagaaggcacatgtaagtggaaaaatgctttcccgttgtgttcgctcaccaagcacatttgttttttt

SEQ ID NO: 410 - RNA, 95 nt, synthetic construct
  source 1..95: mol_type = other RNA
aaggccgacctgtacggccttaaggctgagaaggcacatgtaagtggaaaaatgctttcccgttgtgttcgctcaccaagcacatttgttttttt

SEQ ID NO: 411 - DNA, 148 bp, synthetic construct
  source 1..148: mol_type = other DNA
ggtcgttgtaaaacgtaacgctagccttatggcaatcgcgaacgaacgactgaaggccgacctgtacggcctgaaggatgagaaggcacatattagaggaaaaaaatggttccctttgtgaccgctcaccaaacacatgtttattttt

SEQ ID NO: 412 - RNA, 96 nt, synthetic construct
  source 1..96: mol_type = other RNA
aaggccgacctgtacggcctgaaggatgagaaggcacatattagaggaaaaaaatggttccctttgtgaccgctcaccaaacacatgtttattttt

SEQ ID NO: 413 - RNA, 80 nt, synthetic construct
  source 1..80: mol_type = other RNA
atgaataggattcgtcctatggggcagttggttgcccttagcctgaggcatttattgcactcgggaagtaccatttctca

SEQ ID NO: 414 - RNA, 80 nt, synthetic construct
  source 1..80: mol_type = other RNA
atgaataggatttatcctatggggcagttggttgcccttagcctgaggcatttaatgcactcgggaagtaccttttctca

SEQ ID NO: 415 - RNA, 80 nt, synthetic construct
  source 1..80: mol_type = other RNA
aagaataggattcatcctatggggcagttggttgcccttagcctgaggaatttaattcactcgggaagtacctttctcat

SEQ ID NO: 416 - RNA, 80 nt, synthetic construct
  source 1..80: mol_type = other RNA
atggataggattcgtcctatggggcagttgggaccatgtaatgcccttagcctgaggaattcatttcactcgggaagtat

SEQ ID NO: 417 - RNA, 80 nt, synthetic construct
  source 1..80: mol_type = other RNA
atgaataggatttatcctatggggcagttggatgcccttagcctgaggcatttattgcactcgggaagtaccttttctca

SEQ ID NO: 418 - RNA, 84 nt, synthetic construct
  source 1..84: mol_type = other RNA
tattttctaatggggttgttggaaagagcttttactgaaatttgtaaaggtgccctgaacttgagaattgaaaaattactcgag

SEQ ID NO: 419 - RNA, 75 nt, synthetic construct
  source 1..75: mol_type = other RNA
atggggttgttggaaagagcttttactgaaatttgtaaaggtgccctgaacttgagaattgaaaaattactcgag

SEQ ID NO: 420 - DNA, 122 bp, synthetic construct
  source 1..122: mol_type = other DNA
ttcgggcggctcggcgtccgtaaatcgagaaagagcttgtaattcctgattctatcaggtgaagcaacactcggtaaggtataacaatacacatgtataatccgtgtatttaagttcatttt

SEQ ID NO: 421 - RNA, 85 nt, synthetic construct
  source 1..85: mol_type = other RNA
ttcgggcggctcggcgtccgtaaatcgagaaagagcttgtaattcctgattctatcaggtgaagcaacactcggtaaggtataac

SEQ ID NO: 422 - DNA, 131 bp, synthetic construct
  source 1..131: mol_type = other DNA
ataagggcggctcagcgtcctaaagtcgagaaagtatgcgtaaacttctttcatagaattgcagatactctcggcaaggtaaaaaccctacaaatttaatccttgtaggcgacttatatttgtgtatattt

SEQ ID NO: 423 - RNA, 84 nt, synthetic construct
  source 1..84: mol_type = other RNA
ataagggcggctcagcgtcctaaagtcgagaaagtatgcgtaaacttctttcatagaattgcagatactctcggcaaggtaaaa

SEQ ID NO: 424 - DNA, 111 bp, synthetic construct
  source 1..111: mol_type = other DNA
attctttcctcggaaagtggtagatactctcggtaaggtaaactgtgtatgaacagtttgaaatcctgcacataaaatccgtgcaggcatcttatagttttgtgcatcttt

SEQ ID NO: 425 - RNA, 91 nt, synthetic construct
  source 1..91: mol_type = other RNA
attctttcctcggaaagtggtagatactctcggtaaggtaaactgtgtatgaacagtttgaaatcctgcacataaaatccgtgcaggcatc

SEQ ID NO: 426 - DNA, 129 bp, synthetic construct
  source 1..129: mol_type = other DNA
ttcgggcggctcggcgtccgtaaaccgagaaagtatatgtaagtctgaatttattcagcgttagatacactcggtaaggttcaaacaatacatattcaatccatgtattcagtatatttgtacattttt

SEQ ID NO: 427 - RNA, 86 nt, synthetic construct
  source 1..86: mol_type = other RNA
ttcgggcggctcggcgtccgtaaaccgagaaagtatatgtaagtctgaatttattcagcgttagatacactcggtaaggttcaaac

SEQ ID NO: 428 - DNA, 133 bp, synthetic construct
  source 1..133: mol_type = other DNA
ttcagggcgactcggcgtcctaaaatcgagaaagtgtacataaatttttaacaaaatacggtaaatactctcggtaaggttttaacgtgcacataataatccgtgcaacagggttacacttttgtgcaatttt

SEQ ID NO: 429 - RNA, 86 nt, synthetic construct
  source 1..86: mol_type = other RNA
ttcagggcgactcggcgtcctaaaatcgagaaagtgtacataaatttttaacaaaatacggtaaatactctcggtaaggttttaac

SEQ ID NO: 430 - RNA, 86 nt, synthetic construct
  source 1..86: mol_type = other RNA
ttcgggcggctcggcgtccgtaaaccgagaaagtatatgtaagtctgaatttattcagcgttagatacactcggtaaggtttaaac

SEQ ID NO: 431 - DNA, 133 bp, synthetic construct
  source 1..133: mol_type = other DNA
ttcagggcgactcggcgtcctaaaatcgagaaagtgtacataagtttttaacaaaatacggtaaatactctcggtaaggttttaacgtgcacataataatccgtgcaacagggttacacttttgtgcaatttt

SEQ ID NO: 432 - RNA, 87 nt, synthetic construct
  source 1..87: mol_type = other RNA
ttcagggcgactcggcgtcctaaaatcgagaaagtgtacataagtttttaacaaaatacggtaaatactctcggtaaggttttaacg

SEQ ID NO: 433 - DNA, 133 bp, synthetic construct
  source 1..133: mol_type = other DNA
tattaagggcggctcagcgtccttaagtcgagaaagtatacataaatttcttatatagaatagtagatactctcggcaaggtataaaccctacaaatttaatccttgtaggcaacttatatttgtatttattt

SEQ ID NO: 434 - RNA, 89 nt, synthetic construct
  source 1..89: mol_type = other RNA
tattaagggcggctcagcgtccttaagtcgagaaagtatacataaatttcttatatagaatagtagatactctcggcaaggtataaacc

SEQ ID NO: 435 - DNA, 130 bp, synthetic construct
  source 1..130: mol_type = other DNA
tttcgggcggctcggcgtccgtaaaccgagaaagtatatgtaagtctgaatttattcagcgttagatacactcggtaaggttcaaacaatacatattcaatccatgtattcagtatatttgtacattttt

SEQ ID NO: 436 - RNA, 87 nt, synthetic construct
  source 1..87: mol_type = other RNA
tttcgggcggctcggcgtccgtaaaccgagaaagtatatgtaagtctgaatttattcagcgttagatacactcggtaaggttcaaac

SEQ ID NO: 437 - DNA, 134 bp, synthetic construct
  source 1..134: mol_type = other DNA
atattaagggcggctcagcgtccttaagtcgagaaagtatacataaatttcttatatagaatagtagatactctcggcaaggtataaaccctacaaatttaatccttgtaggcaacttatatttgtatttattt

SEQ ID NO: 438 - RNA, 89 nt, synthetic construct
  source 1..89: mol_type = other RNA
atattaagggcggctcagcgtccttaagtcgagaaagtatacataaatttcttatatagaatagtagatactctcggcaaggtataaac

SEQ ID NO: 439 - DNA, 133 bp, synthetic construct
  source 1..133: mol_type = other DNA
aaacaagggcggctcaacgtcctagaatcgagaaagtatgcgtaagacttatttattgagcggtagatactctcggtaaggtataaattccacaatgaaaatcctgtggacaccgtataatatgtgcatgttt

SEQ ID NO: 440 - RNA, 90 nt, synthetic construct
  source 1..90: mol_type = other RNA
aaacaagggcggctcaacgtcctagaatcgagaaagtatgcgtaagacttatttattgagcggtagatactctcggtaaggtataaattc

SEQ ID NO: 441 - RNA, 98 nt, synthetic construct
  source 1..98: mol_type = other RNA
tggggcagttggttgcccttagcctgaggcatttattgcactcgggaagtaccatttctcagaaatggtacatccaactattaaatactcgtattgct

SEQ ID NO: 442 - RNA, 99 nt, synthetic construct
  source 1..99: mol_type = other RNA
atggggcagttggttgcccttagcctgaggcatttaatgcactcgggaagtaccttttctcagaaatggtacatccaactattaaatactcgtattgct

SEQ ID NO: 443 - RNA, 99 nt, synthetic construct
  source 1..99: mol_type = other RNA
atggggcagttggttgcccttagcctgaggaatttaattcactcgggaagtacctttctcatgaaatggtacatccaactattaaatactcgtattgct

SEQ ID NO: 444 - RNA, 99 nt, synthetic construct
  source 1..99: mol_type = other RNA
atggggcagttggatgcccttagcctgaggcatttattgcactcgggaagtaccttttctcagaaatggtacatccaactattaaatactcgtattgct

SEQ ID NO: 445 - DNA, 136 bp, synthetic construct
  source 1..136: mol_type = other DNA
ttattagaaatgaaatattttctaatggggttgttggaaagagcttttactgaaatttgtaaaggtgccctgaacttgagaattgaaaaattactcgaggaaatggtacatccaactattaaatactcgtattgct

SEQ ID NO: 446 - DNA, 20 bp, synthetic construct
  source 1..20: mol_type = other DNA
ctacacaatgcgttgcctgg

SEQ ID NO: 447 - DNA, 20 bp, synthetic construct
  source 1..20: mol_type = other DNA
gggctctgacaggtaggacc

SEQ ID NO: 448 - DNA, 20 bp, synthetic construct
  source 1..20: mol_type = other DNA
tgtaggaatcccagccaggc

SEQ ID NO: 449 - DNA, 20 bp, synthetic construct
  source 1..20: mol_type = other DNA
cctggctccacgccctgctg

SEQ ID NO: 450 - DNA, 20 bp, synthetic construct
  source 1..20: mol_type = other DNA
gggaagctgagggcacgagg

SEQ ID NO: 451 - DNA, 20 bp, synthetic construct
  source 1..20: mol_type = other DNA
acagcgatgctgaccccctg

SEQ ID NO: 452 - DNA, 20 bp, synthetic construct
  source 1..20: mol_type = other DNA
ttaacagcgatgctgacccc

SEQ ID NO: 453 - DNA, 20 bp, synthetic construct
  source 1..20: mol_type = other DNA
tatgaccagatggacctggc

SEQ ID NO: 454 - DNA, 20 bp, synthetic construct
  source 1..20: mol_type = other DNA
gggcccctagaaggtggcta

SEQ ID NO: 455 - DNA, 20 bp, synthetic construct
  source 1..20: mol_type = other DNA
taggggccccaactccatgg

SEQ ID NO: 456 - DNA, 20 bp, synthetic construct
  source 1..20: mol_type = other DNA
agaagctccaggtagccacc

SEQ ID NO: 457 - DNA, 20 bp, synthetic construct
  source 1..20: mol_type = other DNA
tccagccaggtccatctggt

SEQ ID NO: 458 - DNA, 20 bp, synthetic construct
  source 1..20: mol_type = other DNA
ttctccagccaggtccatct

SEQ ID NO: 459 - DNA, 20 bp, synthetic construct
  source 1..20: mol_type = other DNA
agcaggctgttgtgtgacat

SEQ ID NO: 460 - DNA, 20 bp, synthetic construct
  source 1..20: mol_type = other DNA
catgtcacacaacagcctgc

SEQ ID NO: 461 - DNA, 20 bp, synthetic construct
  source 1..20: mol_type = other DNA
tgtgacatggaaggtgatga

SEQ ID NO: 462 - DNA, 20 bp, synthetic construct
  source 1..20: mol_type = other DNA
atcaccttccatgtcacaca

SEQ ID NO: 463 - DNA, 20 bp, synthetic construct
  source 1..20: mol_type = other DNA
gcataagcctccctggtctc

SEQ ID NO: 464 - DNA, 20 bp, synthetic construct
  source 1..20: mol_type = other DNA
caggactcccagctggaggg

SEQ ID NO: 465 - DNA, 20 bp, synthetic construct
  source 1..20: mol_type = other DNA
ctcaggccctccagctggga

SEQ ID NO: 466 - DNA, 20 bp, synthetic construct
  source 1..20: mol_type = other DNA
tgctggcatctccatactct

SEQ ID NO: 467 - DNA, 20 bp, synthetic construct
  source 1..20: mol_type = other DNA
tgcccaacttctgctggcat

SEQ ID NO: 468 - DNA, 20 bp, synthetic construct
  source 1..20: mol_type = other DNA
ctgcccaacttctgctggca

SEQ ID NO: 469 - DNA, 20 bp, synthetic construct
  source 1..20: mol_type = other DNA
tctgcccaacttctgctggc

SEQ ID NO: 470 - DNA, 20 bp, synthetic construct
  source 1..20: mol_type = other DNA
tgacttttctgcccaacttc

SEQ ID NO: 471 - DNA, 20 bp, synthetic construct
  source 1..20: mol_type = other DNA
ctgacttttctgcccaactt

SEQ ID NO: 472 - DNA, 20 bp, synthetic construct
  source 1..20: mol_type = other DNA
tctgacttttctgcccaact

SEQ ID NO: 473 - DNA, 20 bp, synthetic construct
  source 1..20: mol_type = other DNA
ccagaggagcttccggcaga

SEQ ID NO: 474 - DNA, 20 bp, synthetic construct
  source 1..20: mol_type = other DNA
aggtctgccggaagctcctc

SEQ ID NO: 475 - DNA, 20 bp, synthetic construct
  source 1..20: mol_type = other DNA
cggcagacctgaagcactgg

SEQ ID NO: 476 - DNA, 20 bp, synthetic construct
  source 1..20: mol_type = other DNA
cagtgcttcaggtctgccgg

SEQ ID NO: 477 - DNA, 20 bp, synthetic construct
  source 1..20: mol_type = other DNA
aacagcgcaggcagtggcag

SEQ ID NO: 478 - DNA, 20 bp, synthetic construct
  source 1..20: mol_type = other DNA
aaccaggagccagcctccgg

SEQ ID NO: 479 - DNA, 20 bp, synthetic construct
  source 1..20: mol_type = other DNA
tccaggcgcatctggccgga

SEQ ID NO: 480 - DNA, 20 bp, synthetic construct
  source 1..20: mol_type = other DNA
ctccaggcgcatctggccgg

SEQ ID NO: 481 - DNA, 20 bp, synthetic construct
  source 1..20: mol_type = other DNA
tctccaggcgcatctggccg

SEQ ID NO: 482 - DNA, 20 bp, synthetic construct
  source 1..20: mol_type = other DNA
ctccagttcctcgttgagct

SEQ ID NO: 483 - DNA, 20 bp, synthetic construct
  source 1..20: mol_type = other DNA
tccagttcctcgttgagctg

SEQ ID NO: 484 - DNA, 20 bp, synthetic construct
  source 1..20: mol_type = other DNA
aggcagctcaacgaggaact

SEQ ID NO: 485 - DNA, 20 bp, synthetic construct
  source 1..20: mol_type = other DNA
ctcgttgagctgcctgaatc

SEQ ID NO: 486 - DNA, 20 bp, synthetic construct
  source 1..20: mol_type = other DNA
agctgcctgaatctccctga

SEQ ID NO: 487 - DNA, 20 bp, synthetic construct
  source 1..20: mol_type = other DNA
gtccccaccatctccactct

SEQ ID NO: 488 - DNA, 20 bp, synthetic construct
  source 1..20: mol_type = other DNA
tccccaccatctccactctg

SEQ ID NO: 489 - DNA, 20 bp, synthetic construct
  source 1..20: mol_type = other DNA
ccagagcccatggggcagag

SEQ ID NO: 490 - DNA, 20 bp, synthetic construct
  source 1..20: mol_type = other DNA
gccagagcccatggggcaga

SEQ ID NO: 491 - DNA, 20 bp, synthetic construct
  source 1..20: mol_type = other DNA
cagcctcagagatttgccag

SEQ ID NO: 492 - DNA, 20 bp, synthetic construct
  source 1..20: mol_type = other DNA
ggaggccgtggacagtgaat

SEQ ID NO: 493 - DNA, 20 bp, synthetic construct
  source 1..20: mol_type = other DNA
actgtccacggcctcccaac

SEQ ID NO: 494 - DNA, 20 bp, synthetic construct
  source 1..20: mol_type = other DNA
gctccatcagccactgacct

SEQ ID NO: 495 - DNA, 20 bp, synthetic construct
  source 1..20: mol_type = other DNA
aggcatgctgggcaggtcag

SEQ ID NO: 496 - DNA, 20 bp, synthetic construct
  source 1..20: mol_type = other DNA
ctcgggaggtcagggcaggt

SEQ ID NO: 497 - DNA, 20 bp, synthetic construct
  source 1..20: mol_type = other DNA
gctcgggaggtcagggcagg

SEQ ID NO: 498 - DNA, 20 bp, synthetic construct
  source 1..20: mol_type = other DNA
gagacctctccagctgccgg

SEQ ID NO: 499 - DNA, 20 bp, synthetic construct
  source 1..20: mol_type = other DNA
ttggagacctctccagctgc

SEQ ID NO: 500 - DNA, 20 bp, synthetic construct
  source 1..20: mol_type = other DNA
gaagcttgttggagacctct

SEQ ID NO: 501 - DNA, 20 bp, synthetic construct
  source 1..20: mol_type = other DNA
ggaagcttgttggagacctc

SEQ ID NO: 502 - DNA, 20 bp, synthetic construct
  source 1..20: mol_type = other DNA
tggaagcttgttggagacct

SEQ ID NO: 503 - DNA, 20 bp, synthetic construct
  source 1..20: mol_type = other DNA
taccgctcactgcaggacac

SEQ ID NO: 504 - DNA, 20 bp, synthetic construct
  source 1..20: mol_type = other DNA
ctgctgctcctctccagcct

SEQ ID NO: 505 - DNA, 20 bp, synthetic construct
  source 1..20: mol_type = other DNA
ccgctccaggctcttgctgc

SEQ ID NO: 506 - DNA, 20 bp, synthetic construct
  source 1..20: mol_type = other DNA
tgcccagtccggggtggcca

SEQ ID NO: 507 - DNA, 20 bp, synthetic construct
  source 1..20: mol_type = other DNA
ggccagctgccgttctgccc

SEQ ID NO: 508 - DNA, 20 bp, synthetic construct
  source 1..20: mol_type = other DNA
gcagccaacagcacctcagc

SEQ ID NO: 509 - DNA, 20 bp, synthetic construct
  source 1..20: mol_type = other DNA
gctgccaaggagcaccggcg

SEQ ID NO: 510 - DNA, 20 bp, synthetic construct
  source 1..20: mol_type = other DNA
cccagcacagcaatcactcg

SEQ ID NO: 511 - DNA, 20 bp, synthetic construct
  source 1..20: mol_type = other DNA
gcccagcacagcaatcactc

SEQ ID NO: 512 - DNA, 20 bp, synthetic construct
  source 1..20: mol_type = other DNA
ctgtgctgggcaaagctggt

SEQ ID NO: 513 - DNA, 20 bp, synthetic construct
  source 1..20: mol_type = other DNA
ccctgaccagctttgcccag

SEQ ID NO: 514 - DNA, 20 bp, synthetic construct
  source 1..20: mol_type = other DNA
ggctggggcagtgagccggg

SEQ ID NO: 515 - DNA, 20 bp, synthetic construct
  source 1..20: mol_type = other DNA
tggccggcttccccagtacg

SEQ ID NO: 516 - DNA, 20 bp, synthetic construct
  source 1..20: mol_type = other DNA
cccagtacgactttgtcttc

SEQ ID NO: 517 - DNA, 20 bp, synthetic construct
  source 1..20: mol_type = other DNA
gtcttctctgtcccctgcca

SEQ ID NO: 518 - DNA, 20 bp, synthetic construct
  source 1..20: mol_type = other DNA
tcttctctgtcccctgccat

SEQ ID NO: 519 - DNA, 20 bp, synthetic construct
  source 1..20: mol_type = other DNA
tctgtcccctgccattgctt

SEQ ID NO: 520 - DNA, 20 bp, synthetic construct
  source 1..20: mol_type = other DNA
aagcaatggcaggggacaga

SEQ ID NO: 521 - DNA, 20 bp, synthetic construct
  source 1..20: mol_type = other DNA
cttgaaccgtccgggggatg

SEQ ID NO: 522 - DNA, 20 bp, synthetic construct
  source 1..20: mol_type = other DNA
aaccgtccgggggatgccta

SEQ ID NO: 523 - DNA, 20 bp, synthetic construct
  source 1..20: mol_type = other DNA
tccctgggcccacagccact

SEQ ID NO: 524 - DNA, 20 bp, synthetic construct
  source 1..20: mol_type = other DNA
aagatgtggctgaaaacctc

SEQ ID NO: 525 - DNA, 20 bp, synthetic construct
  source 1..20: mol_type = other DNA
tcagccacatcttgaagaga

SEQ ID NO: 526 - DNA, 20 bp, synthetic construct
  source 1..20: mol_type = other DNA
cagccacatcttgaagagac

SEQ ID NO: 527 - DNA, 20 bp, synthetic construct
  source 1..20: mol_type = other DNA
agccacatcttgaagagacc

SEQ ID NO: 528 - DNA, 20 bp, synthetic construct
  source 1..20: mol_type = other DNA
aagagacctgaccgcgttct

SEQ ID NO: 529 - DNA, 20 bp, synthetic construct
  source 1..20: mol_type = other DNA
tgctcatcctagacggcttc

SEQ ID NO: 530 - DNA, 20 bp, synthetic construct
  source 1..20: mol_type = other DNA
cagctcctcgaagccgtcta

SEQ ID NO: 531 - DNA, 20 bp, synthetic construct
  source 1..20: mol_type = other DNA
cgcttccagctcctcgaagc

SEQ ID NO: 532 - DNA, 20 bp, synthetic construct
  source 1..20: mol_type = other DNA
gaggagctggaagcgcaaga

SEQ ID NO: 533 - DNA, 20 bp, synthetic construct
  source 1..20: mol_type = other DNA
ctgcacagcacgtgcggacc

SEQ ID NO: 534 - DNA, 20 bp, synthetic construct
  source 1..20: mol_type = other DNA
tggaaaaggccggccagcag

SEQ ID NO: 535 - DNA, 20 bp, synthetic construct
  source 1..20: mol_type = other DNA
ttctggaaaaggccggccag

SEQ ID NO: 536 - DNA, 20 bp, synthetic construct
  source 1..20: mol_type = other DNA
tccagaagaagctgctccga

SEQ ID NO: 537 - DNA, 20 bp, synthetic construct
  source 1..20: mol_type = other DNA
ccagaagaagctgctccgag

SEQ ID NO: 538 - DNA, 20 bp, synthetic construct
  source 1..20: mol_type = other DNA
cagaagaagctgctccgagg

SEQ ID NO: 539 - DNA, 20 bp, synthetic construct
  source 1..20: mol_type = other DNA
caccctcctcctcacagccc

SEQ ID NO: 540 - DNA, 20 bp, synthetic construct
  source 1..20: mol_type = other DNA
ctcaggctctggaccaggcg

SEQ ID NO: 541 - DNA, 20 bp, synthetic construct
  source 1..20: mol_type = other DNA
gagctgtccggcttctccat

SEQ ID NO: 542 - DNA, 20 bp, synthetic construct
  source 1..20: mol_type = other DNA
agctgtccggcttctccatg

SEQ ID NO: 543 - DNA, 20 bp, synthetic construct
  source 1..20: mol_type = other DNA
tccatggagcaggcccaggc

SEQ ID NO: 544 - DNA, 20 bp, synthetic construct
  source 1..20: mol_type = other DNA
gagagctcagggatgacaga

SEQ ID NO: 545 - DNA, 20 bp, synthetic construct
  source 1..20: mol_type = other DNA
agagctcagggatgacagag

SEQ ID NO: 546 - DNA, 20 bp, synthetic construct
  source 1..20: mol_type = other DNA
gtgctctgtcatccctgagc

SEQ ID NO: 547 - DNA, 20 bp, synthetic construct
  source 1..20: mol_type = other DNA
ttctcagtcacagccacagc

SEQ ID NO: 548 - DNA, 20 bp, synthetic construct
  source 1..20: mol_type = other DNA
tcagtcacagccacagccct

SEQ ID NO: 549 - DNA, 20 bp, synthetic construct
  source 1..20: mol_type = other DNA
gtgccgggcagtgtgccagc

SEQ ID NO: 550 - DNA, 20 bp, synthetic construct
  source 1..20: mol_type = other DNA
tgccgggcagtgtgccagct

SEQ ID NO: 551 - DNA, 20 bp, synthetic construct
  source 1..20: mol_type = other DNA
gcgtcctccccaagctccag

SEQ ID NO: 552 - DNA, 20 bp, synthetic construct
  source 1..20: mol_type = other DNA
gggaggacgccaagctgccc

SEQ ID NO: 553 - DNA, 20 bp, synthetic construct
  source 1..20: mol_type = other DNA
gccagctctgccagggcccc

SEQ ID NO: 554 - DNA, 20 bp, synthetic construct
  source 1..20: mol_type = other DNA
atgtctgcggcccagctccc

SEQ ID NO: 555 - DNA, 20 bp, synthetic construct
  source 1..20: mol_type = other DNA
gatgtctgcggcccagctcc

SEQ ID NO: 556 - DNA, 20 bp, synthetic construct
  source 1..20: mol_type = other DNA
ccatccgcagacgtgaggac

SEQ ID NO: 557 - DNA, 20 bp, synthetic construct
  source 1..20: mol_type = other DNA
gccatcgcccaggtcctcac

SEQ ID NO: 558 - DNA, 20 bp, synthetic construct
  source 1..20: mol_type = other DNA
ggccatcgcccaggtcctca

SEQ ID NO: 559 - DNA, 20 bp, synthetic construct
  source 1..20: mol_type = other DNA
gactaagcctttggccatcg

SEQ ID NO: 560 - DNA, 20 bp, synthetic construct
  source 1..20: mol_type = other DNA
gtccaacacccaccgcgggc

SEQ ID NO: 561 - DNA, 20 bp, synthetic construct
  source 1..20: mol_type = other DNA
caggaggaagctggggaagg

SEQ ID NO: 562 - DNA, 20 bp, synthetic construct
  source 1..20: mol_type = other DNA
cccagcttcctcctgcaatg

SEQ ID NO: 563 - DNA, 20 bp, synthetic construct
  source 1..20: mol_type = other DNA
ctcctgcaatgcttcctggg

SEQ ID NO: 564 - DNA, 20 bp, synthetic construct
  source 1..20: mol_type = other DNA
ctgggggccctgtggctggc

SEQ ID NO: 565 - DNA, 20 bp, synthetic construct
  source 1..20: mol_type = other DNA
gccactcagagccagccaca

SEQ ID NO: 566 - DNA, 20 bp, synthetic construct
  source 1..20: mol_type = other DNA
cgccactcagagccagccac

SEQ ID NO: 567 - DNA, 20 bp, synthetic construct
  source 1..20: mol_type = other DNA
atttcgccactcagagccag

SEQ ID NO: 568 - DNA, 20 bp, synthetic construct
  source 1..20: mol_type = other DNA
tccttgatttcgccactcag

SEQ ID NO: 569 - DNA, 20 bp, synthetic construct
  source 1..20: mol_type = other DNA
gggtcaatgctaggtactgc

SEQ ID NO: 570 - DNA, 20 bp, synthetic construct
  source 1..20: mol_type = other DNA
cttggggtcaatgctaggta

SEQ ID NO: 571 - DNA, 20 bp, synthetic construct
  source 1..20: mol_type = other DNA
ttccttggggtcaatgctag

SEQ ID NO: 572 - DNA, 20 bp, synthetic construct
  source 1..20: mol_type = other DNA
accccaaggaagaagaggcc

SEQ ID NO: 573 - DNA, 20 bp, synthetic construct
  source 1..20: mol_type = other DNA
tcatagggcctcttcttcct

SEQ ID NO: 574 - DNA, 20 bp, synthetic construct
  source 1..20: mol_type = other DNA
ctggctgggctgatcttcca

SEQ ID NO: 575 - DNA, 20 bp, synthetic construct
  source 1..20: mol_type = other DNA
tggctgggctgatcttccag

SEQ ID NO: 576 - DNA, 20 bp, synthetic construct
  source 1..20: mol_type = other DNA
cagcctcccgcccgctgcct

SEQ ID NO: 577 - DNA, 20 bp, synthetic construct
  source 1..20: mol_type = other DNA
ctgtccaccgaggcagccgc

SEQ ID NO: 578 - DNA, 20 bp, synthetic construct
  source 1..20: mol_type = other DNA
tgcttcctgtccaccgaggc

SEQ ID NO: 579 - DNA, 20 bp, synthetic construct
  source 1..20: mol_type = other DNA
aggtacctcgcaagcacctt

SEQ ID NO: 580 - DNA, 20 bp, synthetic construct
  source 1..20: mol_type = other DNA
cgaggtacctgaagcggctg

SEQ ID NO: 581 - DNA, 20 bp, synthetic construct
  source 1..20: mol_type = other DNA
cagcctcctcggcctcgtgg

SEQ ID NO: 582 - DNA, 20 bp, synthetic construct
  source 1..20: mol_type = other DNA
ggcagcacgtggtacaggag

SEQ ID NO: 583 - DNA, 20 bp, synthetic construct
  source 1..20: mol_type = other DNA
gcagcacgtggtacaggagc

SEQ ID NO: 584 - DNA, 20 bp, synthetic construct
  source 1..20: mol_type = other DNA
tctgggcacccgcctcacgc

SEQ ID NO: 585 - DNA, 20 bp, synthetic construct
  source 1..20: mol_type = other DNA
ctgggcacccgcctcacgcc

SEQ ID NO: 586 - DNA, 20 bp, synthetic construct
  source 1..20: mol_type = other DNA
tgggcacccgcctcacgcct

SEQ ID NO: 587 - DNA, 20 bp, synthetic construct
  source 1..20: mol_type = other DNA
cccagtacatgtgcatcagg

SEQ ID NO: 588 - DNA, 20 bp, synthetic construct
  source 1..20: mol_type = other DNA
gcccgccgcctccaaggcct

SEQ ID NO: 589 - DNA, 20 bp, synthetic construct
  source 1..20: mol_type = other DNA
gaggcggcgggccaagactt

SEQ ID NO: 590 - DNA, 20 bp, synthetic construct
  source 1..20: mol_type = other DNA
tccctggacctccgcagcac

SEQ ID NO: 591 - DNA, 20 bp, synthetic construct
  source 1..20: mol_type = other DNA
gcccctctggattggggagc

SEQ ID NO: 592 - DNA, 20 bp, synthetic construct
  source 1..20: mol_type = other DNA
cccctctggattggggagcc

SEQ ID NO: 593 - DNA, 20 bp, synthetic construct
  source 1..20: mol_type = other DNA
gggagcctcgtgggactcag

SEQ ID NO: 594 - DNA, 20 bp, synthetic construct
  source 1..20: mol_type = other DNA
gtctccccatgctgctgcag

SEQ ID NO: 595 - DNA, 20 bp, synthetic construct
  source 1..20: mol_type = other DNA
tcctctgctgcctgaagtag

SEQ ID NO: 596 - DNA, 20 bp, synthetic construct
  source 1..20: mol_type = other DNA
aggcagcagaggagaagttc

SEQ ID NO: 597 - DNA, 20 bp, synthetic construct
  source 1..20: mol_type = other DNA
aaaggctcgatggtgaactt

SEQ ID NO: 598 - DNA, 20 bp, synthetic construct
  source 1..20: mol_type = other DNA
gaaaggctcgatggtgaact

SEQ ID NO: 599 - DNA, 20 bp, synthetic construct
  source 1..20: mol_type = other DNA
accatcgagcctttcaaagc

SEQ ID NO: 600 - DNA, 20 bp, synthetic construct
  source 1..20: mol_type = other DNA
gctttgaaaggctcgatggt

SEQ ID NO: 601 - DNA, 20 bp, synthetic construct
  source 1..20: mol_type = other DNA
agggacttggctttgaaagg

SEQ ID NO: 602 - DNA, 20 bp, synthetic construct
  source 1..20: mol_type = other DNA
caaagccaagtccctgaagg

SEQ ID NO: 603 - DNA, 20 bp, synthetic construct
  source 1..20: mol_type = other DNA
aaagccaagtccctgaagga

SEQ ID NO: 604 - DNA, 20 bp, synthetic construct
  source 1..20: mol_type = other DNA
cacatccttcagggacttgg

SEQ ID NO: 605 - DNA, 20 bp, synthetic construct
  source 1..20: mol_type = other DNA
ccaggtcttccacatccttc

SEQ ID NO: 606 - DNA, 20 bp, synthetic construct
  source 1..20: mol_type = other DNA
cccaggtcttccacatcctt

SEQ ID NO: 607 - DNA, 20 bp, synthetic construct
  source 1..20: mol_type = other DNA
ctcggaagacacagctgggg

SEQ ID NO: 608 - DNA, 20 bp, synthetic construct
  source 1..20: mol_type = other DNA
ggtcccgaacagcagggagc

SEQ ID NO: 609 - DNA, 20 bp, synthetic construct
  source 1..20: mol_type = other DNA
aggtcccgaacagcagggag

SEQ ID NO: 610 - DNA, 20 bp, synthetic construct
  source 1..20: mol_type = other DNA
tttaggtcccgaacagcagg

SEQ ID NO: 611 - DNA, 20 bp, synthetic construct
  source 1..20: mol_type = other DNA
ctttaggtcccgaacagcag

SEQ ID NO: 612 - DNA, 20 bp, synthetic construct
  source 1..20: mol_type = other DNA
gggacctaaagaaactggag

SEQ ID NO: 613 - DNA, 20 bp, synthetic construct
  source 1..20: mol_type = other DNA
gggaaagcctgggggcctga

SEQ ID NO: 614 - DNA, 20 bp, synthetic construct
  source 1..20: mol_type = other DNA
ggggaaagcctgggggcctg

SEQ ID NO: 615 - DNA, 20 bp, synthetic construct
  source 1..20: mol_type = other DNA
ccccaaactggtgcggatcc

SEQ ID NO: 616 - DNA, 20 bp, synthetic construct
  source 1..20: mol_type = other DNA
cccaaactggtgcggatcct

SEQ ID NO: 617 - DNA, 20 bp, synthetic construct
  source 1..20: mol_type = other DNA
ttctcactcagcgcatccag

SEQ ID NO: 618 - DNA, 20 bp, synthetic construct
  source 1..20: mol_type = other DNA
agctgggggaaggtggctga

SEQ ID NO: 619 - DNA, 20 bp, synthetic construct
  source 1..20: mol_type = other DNA
ccccagctgaagtccttgga

SEQ ID NO: 620 - DNA, 20 bp, synthetic construct
  source 1..20: mol_type = other DNA
caaggacttcagctggggga

SEQ ID NO: 621 - DNA, 20 bp, synthetic construct
  source 1..20: mol_type = other DNA
ccaaggacttcagctggggg

SEQ ID NO: 622 - DNA, 20 bp, synthetic construct
  source 1..20: mol_type = other DNA
agggtttccaaggacttcag

SEQ ID NO: 623 - DNA, 20 bp, synthetic construct
  source 1..20: mol_type = other DNA
taggcacccaggtcagtgat

SEQ ID NO: 624 - DNA, 20 bp, synthetic construct
  source 1..20: mol_type = other DNA
gtaggcacccaggtcagtga

SEQ ID NO: 625 - DNA, 20 bp, synthetic construct
  source 1..20: mol_type = other DNA
gctcgctgcatccctgctca

SEQ ID NO: 626 - DNA, 20 bp, synthetic construct
  source 1..20: mol_type = other DNA
gcctgagcagggatgcagcg

SEQ ID NO: 627 - DNA, 20 bp, synthetic construct
  source 1..20: mol_type = other DNA
tacaataactgcatctgcga

SEQ ID NO: 628 - DNA, 20 bp, synthetic construct
  source 1..20: mol_type = other DNA
gctcgtgtgcttccggacat

SEQ ID NO: 629 - DNA, 20 bp, synthetic construct
  source 1..20: mol_type = other DNA
cggacatggtgtccctccgg

SEQ ID NO: 630 - DNA, 20 bp, synthetic construct
  source 1..20: mol_type = other DNA
acggctgccggggcccagca

SEQ ID NO: 631 - DNA, 20 bp, synthetic construct
  source 1..20: mol_type = other DNA
ggaggtgtcctcatgtggag

SEQ ID NO: 632 - DNA, 20 bp, synthetic construct
  source 1..20: mol_type = other DNA
ctggacactgaatgggatgg

SEQ ID NO: 633 - DNA, 20 bp, synthetic construct
  source 1..20: mol_type = other DNA
agtgtccaggaacacctgca

SEQ ID NO: 634 - DNA, 20 bp, synthetic construct
  source 1..20: mol_type = other DNA
caggtgttcctggacactga

SEQ ID NO: 635 - DNA, 20 bp, synthetic construct
  source 1..20: mol_type = other DNA
ttgcaggtgttcctggacac

SEQ ID NO: 636 - DNA, 20 bp, synthetic construct
  source 1..20: mol_type = other DNA
acggatcagcctgagatgat

SEQ ID NO: 637 - RNA, 56 nt, synthetic construct
  source 1..56: mol_type = other RNA
ctttcaagactaatagattgctccttacgaggagacctacacaatgcgttgcctgg

SEQ ID NO: 638 - RNA, 56 nt, synthetic construct
  source 1..56: mol_type = other RNA
ctttcaagactaatagattgctccttacgaggagacgggctctgacaggtaggacc

SEQ ID NO: 639 - RNA, 56 nt, synthetic construct
  source 1..56: mol_type = other RNA
ctttcaagactaatagattgctccttacgaggagactgtaggaatcccagccaggc

SEQ ID NO: 640 - RNA, 56 nt, synthetic construct
  source 1..56: mol_type = other RNA
ctttcaagactaatagattgctccttacgaggagaccctggctccacgccctgctg

SEQ ID NO: 641 - RNA, 56 nt, synthetic construct
  source 1..56: mol_type = other RNA
ctttcaagactaatagattgctccttacgaggagacgggaagctgagggcacgagg

SEQ ID NO: 642 - RNA, 56 nt, synthetic construct
  source 1..56: mol_type = other RNA
ctttcaagactaatagattgctccttacgaggagacacagcgatgctgaccccctg

SEQ ID NO: 643 - RNA, 56 nt, synthetic construct
  source 1..56: mol_type = other RNA
ctttcaagactaatagattgctccttacgaggagacttaacagcgatgctgacccc

SEQ ID NO: 644 - RNA, 56 nt, synthetic construct
  source 1..56: mol_type = other RNA
ctttcaagactaatagattgctccttacgaggagactatgaccagatggacctggc

SEQ ID NO: 645 - RNA, 56 nt, synthetic construct
  source 1..56: mol_type = other RNA
ctttcaagactaatagattgctccttacgaggagacgggcccctagaaggtggcta

SEQ ID NO: 646 - RNA, 56 nt, synthetic construct
  source 1..56: mol_type = other RNA
ctttcaagactaatagattgctccttacgaggagactaggggccccaactccatgg

SEQ ID NO: 647 - RNA, 56 nt, synthetic construct
  source 1..56: mol_type = other RNA
ctttcaagactaatagattgctccttacgaggagacagaagctccaggtagccacc

SEQ ID NO: 648 - RNA, 56 nt, synthetic construct
  source 1..56: mol_type = other RNA
ctttcaagactaatagattgctccttacgaggagactccagccaggtccatctggt

SEQ ID NO: 649 - RNA, 56 nt, synthetic construct
  source 1..56: mol_type = other RNA
ctttcaagactaatagattgctccttacgaggagacttctccagccaggtccatct

SEQ ID NO: 650 - RNA, 56 nt, synthetic construct
  source 1..56: mol_type = other RNA
ctttcaagactaatagattgctccttacgaggagacagcaggctgttgtgtgacat

SEQ ID NO: 651 - RNA, 56 nt, synthetic construct
  source 1..56: mol_type = other RNA
ctttcaagactaatagattgctccttacgaggagaccatgtcacacaacagcctgc

SEQ ID NO: 652 - RNA, 56 nt, synthetic construct
  source 1..56: mol_type = other RNA
ctttcaagactaatagattgctccttacgaggagactgtgacatggaaggtgatga

SEQ ID NO: 653 - RNA, 56 nt, synthetic construct
  source 1..56: mol_type = other RNA
ctttcaagactaatagattgctccttacgaggagacatcaccttccatgtcacaca

SEQ ID NO: 654 - RNA, 56 nt, synthetic construct
  source 1..56: mol_type = other RNA
ctttcaagactaatagattgctccttacgaggagacgcataagcctccctggtctc

SEQ ID NO: 655 - RNA, 56 nt, synthetic construct
  source 1..56: mol_type = other RNA
ctttcaagactaatagattgctccttacgaggagaccaggactcccagctggaggg

SEQ ID NO: 656 - RNA, 56 nt, synthetic construct
  source 1..56: mol_type = other RNA
ctttcaagactaatagattgctccttacgaggagacctcaggccctccagctggga

SEQ ID NO: 657 - RNA, 56 nt, synthetic construct
  source 1..56: mol_type = other RNA
ctttcaagactaatagattgctccttacgaggagactgctggcatctccatactct

SEQ ID NO: 658 - RNA, 56 nt, synthetic construct
  source 1..56: mol_type = other RNA
ctttcaagactaatagattgctccttacgaggagactgcccaacttctgctggcat

SEQ ID NO: 659 - RNA, 56 nt, synthetic construct
  source 1..56: mol_type = other RNA
ctttcaagactaatagattgctccttacgaggagacctgcccaacttctgctggca

SEQ ID NO: 660 - RNA, 56 nt, synthetic construct
  source 1..56: mol_type = other RNA
ctttcaagactaatagattgctccttacgaggagactctgcccaacttctgctggc

SEQ ID NO: 661 - RNA, 56 nt, synthetic construct
  source 1..56: mol_type = other RNA
ctttcaagactaatagattgctccttacgaggagactgacttttctgcccaacttc

SEQ ID NO: 662 - RNA, 56 nt, synthetic construct
  source 1..56: mol_type = other RNA
ctttcaagactaatagattgctccttacgaggagacctgacttttctgcccaactt

SEQ ID NO: 663 - RNA, 56 nt, synthetic construct
  source 1..56: mol_type = other RNA
ctttcaagactaatagattgctccttacgaggagactctgacttttctgcccaact

SEQ ID NO: 664 - RNA, 56 nt, synthetic construct
  source 1..56: mol_type = other RNA
ctttcaagactaatagattgctccttacgaggagacccagaggagcttccggcaga

SEQ ID NO: 665 - RNA, 56 nt, synthetic construct
  source 1..56: mol_type = other RNA
ctttcaagactaatagattgctccttacgaggagacaggtctgccggaagctcctc

SEQ ID NO: 666 - RNA, 56 nt, synthetic construct
  source 1..56: mol_type = other RNA
ctttcaagactaatagattgctccttacgaggagaccggcagacctgaagcactgg

SEQ ID NO: 667 - RNA, 56 nt, synthetic construct
  source 1..56: mol_type = other RNA
ctttcaagactaatagattgctccttacgaggagaccagtgcttcaggtctgccgg

SEQ ID NO: 668 - RNA, 56 nt, synthetic construct
  source 1..56: mol_type = other RNA
ctttcaagactaatagattgctccttacgaggagacaacagcgcaggcagtggcag

SEQ ID NO: 669 - RNA, 56 nt, synthetic construct
  source 1..56: mol_type = other RNA
ctttcaagactaatagattgctccttacgaggagacaaccaggagccagcctccgg

SEQ ID NO: 670 - RNA, 56 nt, synthetic construct
  source 1..56: mol_type = other RNA
ctttcaagactaatagattgctccttacgaggagactccaggcgcatctggccgga

SEQ ID NO: 671 - RNA, 56 nt, synthetic construct
  source 1..56: mol_type = other RNA
ctttcaagactaatagattgctccttacgaggagacctccaggcgcatctggccgg

SEQ ID NO: 672 - RNA, 56 nt, synthetic construct
  source 1..56: mol_type = other RNA
ctttcaagactaatagattgctccttacgaggagactctccaggcgcatctggccg

SEQ ID NO: 673 - RNA, 56 nt, synthetic construct
  source 1..56: mol_type = other RNA
ctttcaagactaatagattgctccttacgaggagacctccagttcctcgttgagct

SEQ ID NO: 674 - RNA, 56 nt, synthetic construct
  source 1..56: mol_type = other RNA
ctttcaagactaatagattgctccttacgaggagactccagttcctcgttgagctg

SEQ ID NO: 675 - RNA, 56 nt, synthetic construct
  source 1..56: mol_type = other RNA
ctttcaagactaatagattgctccttacgaggagacaggcagctcaacgaggaact

SEQ ID NO: 676 - RNA, 56 nt, synthetic construct
  source 1..56: mol_type = other RNA
ctttcaagactaatagattgctccttacgaggagacctcgttgagctgcctgaatc

SEQ ID NO: 677 - RNA, 56 nt, synthetic construct
  source 1..56: mol_type = other RNA
ctttcaagactaatagattgctccttacgaggagacagctgcctgaatctccctga

SEQ ID NO: 678 - RNA, 56 nt, synthetic construct
  source 1..56: mol_type = other RNA
ctttcaagactaatagattgctccttacgaggagacgtccccaccatctccactct

SEQ ID NO: 679 - RNA, 56 nt, synthetic construct
  source 1..56: mol_type = other RNA
ctttcaagactaatagattgctccttacgaggagactccccaccatctccactctg

SEQ ID NO: 680 - RNA, 56 nt, synthetic construct
  source 1..56: mol_type = other RNA
ctttcaagactaatagattgctccttacgaggagacccagagcccatggggcagag

SEQ ID NO: 681 - RNA, 56 nt, synthetic construct
  source 1..56: mol_type = other RNA
ctttcaagactaatagattgctccttacgaggagacgccagagcccatggggcaga

SEQ ID NO: 682 - RNA, 56 nt, synthetic construct
  source 1..56: mol_type = other RNA
ctttcaagactaatagattgctccttacgaggagaccagcctcagagatttgccag

SEQ ID NO: 683 - RNA, 56 nt, synthetic construct
  source 1..56: mol_type = other RNA
ctttcaagactaatagattgctccttacgaggagacggaggccgtggacagtgaat

SEQ ID NO: 684 - RNA, 56 nt, synthetic construct
  source 1..56: mol_type = other RNA
ctttcaagactaatagattgctccttacgaggagacactgtccacggcctcccaac

SEQ ID NO: 685 - RNA, 56 nt, synthetic construct
  source 1..56: mol_type = other RNA
ctttcaagactaatagattgctccttacgaggagacgctccatcagccactgacct

SEQ ID NO: 686 - RNA, 56 nt, synthetic construct
  source 1..56: mol_type = other RNA
ctttcaagactaatagattgctccttacgaggagacaggcatgctgggcaggtcag

SEQ ID NO: 687 - RNA, 56 nt, synthetic construct
  source 1..56: mol_type = other RNA
ctttcaagactaatagattgctccttacgaggagacctcgggaggtcagggcaggt

SEQ ID NO: 688 - RNA, 56 nt, synthetic construct
  source 1..56: mol_type = other RNA
ctttcaagactaatagattgctccttacgaggagacgctcgggaggtcagggcagg

SEQ ID NO: 689 - RNA, 56 nt, synthetic construct
  source 1..56: mol_type = other RNA
ctttcaagactaatagattgctccttacgaggagacgagacctctccagctgccgg

SEQ ID NO: 690 - RNA, 56 nt, synthetic construct
  source 1..56: mol_type = other RNA
ctttcaagactaatagattgctccttacgaggagacttggagacctctccagctgc

SEQ ID NO: 691 - RNA, 56 nt, synthetic construct
  source 1..56: mol_type = other RNA
ctttcaagactaatagattgctccttacgaggagacgaagcttgttggagacctct

SEQ ID NO: 692 - RNA, 56 nt, synthetic construct
  source 1..56: mol_type = other RNA
ctttcaagactaatagattgctccttacgaggagacggaagcttgttggagacctc

SEQ ID NO: 693 - RNA, 56 nt, synthetic construct
  source 1..56: mol_type = other RNA
ctttcaagactaatagattgctccttacgaggagactggaagcttgttggagacct

SEQ ID NO: 694 - RNA, 56 nt, synthetic construct
  source 1..56: mol_type = other RNA
ctttcaagactaatagattgctccttacgaggagactaccgctcactgcaggacac

SEQ ID NO: 695 - RNA, 56 nt, synthetic construct
  source 1..56: mol_type = other RNA
ctttcaagactaatagattgctccttacgaggagacctgctgctcctctccagcct

SEQ ID NO: 696 - RNA, 56 nt, synthetic construct
  source 1..56: mol_type = other RNA
ctttcaagactaatagattgctccttacgaggagacccgctccaggctcttgctgc

SEQ ID NO: 697 - RNA, 56 nt, synthetic construct
  source 1..56: mol_type = other RNA
ctttcaagactaatagattgctccttacgaggagactgcccagtccggggtggcca

SEQ ID NO: 698 - RNA, 56 nt, synthetic construct
  source 1..56: mol_type = other RNA
ctttcaagactaatagattgctccttacgaggagacggccagctgccgttctgccc

SEQ ID NO: 699 - RNA, 56 nt, synthetic construct
  source 1..56: mol_type = other RNA
ctttcaagactaatagattgctccttacgaggagacgcagccaacagcacctcagc

SEQ ID NO: 700 - RNA, 56 nt, synthetic construct
  source 1..56: mol_type = other RNA
ctttcaagactaatagattgctccttacgaggagacgctgccaaggagcaccggcg

SEQ ID NO: 701 - RNA, 56 nt, synthetic construct
  source 1..56: mol_type = other RNA
ctttcaagactaatagattgctccttacgaggagaccccagcacagcaatcactcg

SEQ ID NO: 702 - RNA, 56 nt, synthetic construct
  source 1..56: mol_type = other RNA
ctttcaagactaatagattgctccttacgaggagacgcccagcacagcaatcactc

SEQ ID NO: 703 - RNA, 56 nt, synthetic construct
  source 1..56: mol_type = other RNA
ctttcaagactaatagattgctccttacgaggagacctgtgctgggcaaagctggt

SEQ ID NO: 704 - RNA, 56 nt, synthetic construct
  source 1..56: mol_type = other RNA
ctttcaagactaatagattgctccttacgaggagacccctgaccagctttgcccag

SEQ ID NO: 705 - RNA, 56 nt, synthetic construct
  source 1..56: mol_type = other RNA
ctttcaagactaatagattgctccttacgaggagacggctggggcagtgagccggg

SEQ ID NO: 706 - RNA, 56 nt, synthetic construct
  source 1..56: mol_type = other RNA
ctttcaagactaatagattgctccttacgaggagactggccggcttccccagtacg

SEQ ID NO: 707 - RNA, 56 nt, synthetic construct
  source 1..56: mol_type = other RNA
ctttcaagactaatagattgctccttacgaggagaccccagtacgactttgtcttc

SEQ ID NO: 708 - RNA, 56 nt, synthetic construct
  source 1..56: mol_type = other RNA
ctttcaagactaatagattgctccttacgaggagacgtcttctctgtcccctgcca

SEQ ID NO: 709 - RNA, 56 nt, synthetic construct
  source 1..56: mol_type = other RNA
ctttcaagactaatagattgctccttacgaggagactcttctctgtcccctgccat

SEQ ID NO: 710 - RNA, 56 nt, synthetic construct
  source 1..56: mol_type = other RNA
ctttcaagactaatagattgctccttacgaggagactctgtcccctgccattgctt

SEQ ID NO: 711 - RNA, 56 nt, synthetic construct
  source 1..56: mol_type = other RNA
ctttcaagactaatagattgctccttacgaggagacaagcaatggcaggggacaga

SEQ ID NO: 712 - RNA, 56 nt, synthetic construct
  source 1..56: mol_type = other RNA
ctttcaagactaatagattgctccttacgaggagaccttgaaccgtccgggggatg

SEQ ID NO: 713 - RNA, 56 nt, synthetic construct
  source 1..56: mol_type = other RNA
ctttcaagactaatagattgctccttacgaggagacaaccgtccgggggatgccta

SEQ ID NO: 714 - RNA, 56 nt, synthetic construct
  source 1..56: mol_type = other RNA
ctttcaagactaatagattgctccttacgaggagactccctgggcccacagccact

SEQ ID NO: 715 - RNA, 56 nt, synthetic construct
  source 1..56: mol_type = other RNA
ctttcaagactaatagattgctccttacgaggagacaagatgtggctgaaaacctc

SEQ ID NO: 716 - RNA, 56 nt, synthetic construct
  source 1..56: mol_type = other RNA
ctttcaagactaatagattgctccttacgaggagactcagccacatcttgaagaga

SEQ ID NO: 717 - RNA, 56 nt, synthetic construct
  source 1..56: mol_type = other RNA
ctttcaagactaatagattgctccttacgaggagaccagccacatcttgaagagac

SEQ ID NO: 718 - RNA, 56 nt, synthetic construct
  source 1..56: mol_type = other RNA
ctttcaagactaatagattgctccttacgaggagacagccacatcttgaagagacc

SEQ ID NO: 719 - RNA, 56 nt, synthetic construct
  source 1..56: mol_type = other RNA
ctttcaagactaatagattgctccttacgaggagacaagagacctgaccgcgttct

SEQ ID NO: 720 - RNA, 56 nt, synthetic construct
  source 1..56: mol_type = other RNA
ctttcaagactaatagattgctccttacgaggagactgctcatcctagacggcttc

SEQ ID NO: 721 - RNA, 56 nt, synthetic construct
  source 1..56: mol_type = other RNA
ctttcaagactaatagattgctccttacgaggagaccagctcctcgaagccgtcta

SEQ ID NO: 722 - RNA, 56 nt, synthetic construct
  source 1..56: mol_type = other RNA
ctttcaagactaatagattgctccttacgaggagaccgcttccagctcctcgaagc

SEQ ID NO: 723 - RNA, 56 nt, synthetic construct
  source 1..56: mol_type = other RNA
ctttcaagactaatagattgctccttacgaggagacgaggagctggaagcgcaaga

SEQ ID NO: 724 - RNA, 56 nt, synthetic construct
  source 1..56: mol_type = other RNA
ctttcaagactaatagattgctccttacgaggagacctgcacagcacgtgcggacc

SEQ ID NO: 725 - RNA, 56 nt, synthetic construct
  source 1..56: mol_type = other RNA
ctttcaagactaatagattgctccttacgaggagactggaaaaggccggccagcag

SEQ ID NO: 726 - RNA, 56 nt, synthetic construct
  source 1..56: mol_type = other RNA
ctttcaagactaatagattgctccttacgaggagacttctggaaaaggccggccag

SEQ ID NO: 727 - RNA, 56 nt, synthetic construct
  source 1..56: mol_type = other RNA
ctttcaagactaatagattgctccttacgaggagactccagaagaagctgctccga

SEQ ID NO: 728 - RNA, 56 nt, synthetic construct
  source 1..56: mol_type = other RNA
ctttcaagactaatagattgctccttacgaggagacccagaagaagctgctccgag

SEQ ID NO: 729 - RNA, 56 nt, synthetic construct
  source 1..56: mol_type = other RNA
ctttcaagactaatagattgctccttacgaggagaccagaagaagctgctccgagg

SEQ ID NO: 730 - RNA, 56 nt, synthetic construct
  source 1..56: mol_type = other RNA
ctttcaagactaatagattgctccttacgaggagaccaccctcctcctcacagccc

SEQ ID NO: 731 - RNA, 56 nt, synthetic construct
  source 1..56: mol_type = other RNA
ctttcaagactaatagattgctccttacgaggagacctcaggctctggaccaggcg

SEQ ID NO: 732 - RNA, 56 nt, synthetic construct
  source 1..56: mol_type = other RNA
ctttcaagactaatagattgctccttacgaggagacgagctgtccggcttctccat

SEQ ID NO: 733 - RNA, 56 nt, synthetic construct
  source 1..56: mol_type = other RNA
ctttcaagactaatagattgctccttacgaggagacagctgtccggcttctccatg

SEQ ID NO: 734 - RNA, 56 nt, synthetic construct
  source 1..56: mol_type = other RNA
ctttcaagactaatagattgctccttacgaggagactccatggagcaggcccaggc

SEQ ID NO: 735 - RNA, 56 nt, synthetic construct
  source 1..56: mol_type = other RNA
ctttcaagactaatagattgctccttacgaggagacgagagctcagggatgacaga

SEQ ID NO: 736 - RNA, 56 nt, synthetic construct
  source 1..56: mol_type = other RNA
ctttcaagactaatagattgctccttacgaggagacagagctcagggatgacagag

SEQ ID NO: 737 - RNA, 56 nt, synthetic construct
  source 1..56: mol_type = other RNA
ctttcaagactaatagattgctccttacgaggagacgtgctctgtcatccctgagc

SEQ ID NO: 738 - RNA, 56 nt, synthetic construct
  source 1..56: mol_type = other RNA
ctttcaagactaatagattgctccttacgaggagacttctcagtcacagccacagc

SEQ ID NO: 739 - RNA, 56 nt, synthetic construct
  source 1..56: mol_type = other RNA
ctttcaagactaatagattgctccttacgaggagactcagtcacagccacagccct

SEQ ID NO: 740 - RNA, 56 nt, synthetic construct
  source 1..56: mol_type = other RNA
ctttcaagactaatagattgctccttacgaggagacgtgccgggcagtgtgccagc

SEQ ID NO: 741 - RNA, 56 nt, synthetic construct
  source 1..56: mol_type = other RNA
ctttcaagactaatagattgctccttacgaggagactgccgggcagtgtgccagct

SEQ ID NO: 742 - RNA, 56 nt, synthetic construct
  source 1..56: mol_type = other RNA
ctttcaagactaatagattgctccttacgaggagacgcgtcctccccaagctccag

SEQ ID NO: 743 - RNA, 56 nt, synthetic construct
  source 1..56: mol_type = other RNA
ctttcaagactaatagattgctccttacgaggagacgggaggacgccaagctgccc

SEQ ID NO: 744 - RNA, 56 nt, synthetic construct
  source 1..56: mol_type = other RNA
ctttcaagactaatagattgctccttacgaggagacgccagctctgccagggcccc

SEQ ID NO: 745 - RNA, 56 nt, synthetic construct
  source 1..56: mol_type = other RNA
ctttcaagactaatagattgctccttacgaggagacatgtctgcggcccagctccc

SEQ ID NO: 746 - RNA, 56 nt, synthetic construct
  source 1..56: mol_type = other RNA
ctttcaagactaatagattgctccttacgaggagacgatgtctgcggcccagctcc

SEQ ID NO: 747 - RNA, 56 nt, synthetic construct
  source 1..56: mol_type = other RNA
ctttcaagactaatagattgctccttacgaggagacccatccgcagacgtgaggac

SEQ ID NO: 748 - RNA, 56 nt, synthetic construct
  source 1..56: mol_type = other RNA
ctttcaagactaatagattgctccttacgaggagacgccatcgcccaggtcctcac

SEQ ID NO: 749 - RNA, 56 nt, synthetic construct
  source 1..56: mol_type = other RNA
ctttcaagactaatagattgctccttacgaggagacggccatcgcccaggtcctca

SEQ ID NO: 750 - RNA, 56 nt, synthetic construct
  source 1..56: mol_type = other RNA
ctttcaagactaatagattgctccttacgaggagacgactaagcctttggccatcg

SEQ ID NO: 751 - RNA, 56 nt, synthetic construct
  source 1..56: mol_type = other RNA
ctttcaagactaatagattgctccttacgaggagacgtccaacacccaccgcgggc

SEQ ID NO: 752 - RNA, 56 nt, synthetic construct
  source 1..56: mol_type = other RNA
ctttcaagactaatagattgctccttacgaggagaccaggaggaagctggggaagg

SEQ ID NO: 753 - RNA, 56 nt, synthetic construct
  source 1..56: mol_type = other RNA
ctttcaagactaatagattgctccttacgaggagaccccagcttcctcctgcaatg

SEQ ID NO: 754 - RNA, 56 nt, synthetic construct
  source 1..56: mol_type = other RNA
ctttcaagactaatagattgctccttacgaggagacctcctgcaatgcttcctggg

SEQ ID NO: 755 - RNA, 56 nt, synthetic construct
  source 1..56: mol_type = other RNA
ctttcaagactaatagattgctccttacgaggagacctgggggccctgtggctggc

SEQ ID NO: 756 - RNA, 56 nt, synthetic construct
  source 1..56: mol_type = other RNA
ctttcaagactaatagattgctccttacgaggagacgccactcagagccagccaca

SEQ ID NO: 757 - RNA, 56 nt, synthetic construct
  source 1..56: mol_type = other RNA
ctttcaagactaatagattgctccttacgaggagaccgccactcagagccagccac

SEQ ID NO: 758 - RNA, 56 nt, synthetic construct
  source 1..56: mol_type = other RNA
ctttcaagactaatagattgctccttacgaggagacatttcgccactcagagccag

SEQ ID NO: 759 - RNA, 56 nt, synthetic construct
  source 1..56: mol_type = other RNA
ctttcaagactaatagattgctccttacgaggagactccttgatttcgccactcag

SEQ ID NO: 760 - RNA, 56 nt, synthetic construct
  source 1..56: mol_type = other RNA
ctttcaagactaatagattgctccttacgaggagacgggtcaatgctaggtactgc

SEQ ID NO: 761 - RNA, 56 nt, synthetic construct
  source 1..56: mol_type = other RNA
ctttcaagactaatagattgctccttacgaggagaccttggggtcaatgctaggta

SEQ ID NO: 762 - RNA, 56 nt, synthetic construct
  source 1..56: mol_type = other RNA
ctttcaagactaatagattgctccttacgaggagacttccttggggtcaatgctag

SEQ ID NO: 763 - RNA, 56 nt, synthetic construct
  source 1..56: mol_type = other RNA
ctttcaagactaatagattgctccttacgaggagacaccccaaggaagaagaggcc

SEQ ID NO: 764 - RNA, 56 nt, synthetic construct
  source 1..56: mol_type = other RNA
ctttcaagactaatagattgctccttacgaggagactcatagggcctcttcttcct

SEQ ID NO: 765 - RNA, 56 nt, synthetic construct
  source 1..56: mol_type = other RNA
ctttcaagactaatagattgctccttacgaggagacctggctgggctgatcttcca

SEQ ID NO: 766 - RNA, 56 nt, synthetic construct
  source 1..56: mol_type = other RNA
ctttcaagactaatagattgctccttacgaggagactggctgggctgatcttccag

SEQ ID NO: 767 - RNA, 56 nt, synthetic construct
  source 1..56: mol_type = other RNA
ctttcaagactaatagattgctccttacgaggagaccagcctcccgcccgctgcct

SEQ ID NO: 768 - RNA, 56 nt, synthetic construct
  source 1..56: mol_type = other RNA
ctttcaagactaatagattgctccttacgaggagacctgtccaccgaggcagccgc

SEQ ID NO: 769 - RNA, 56 nt, synthetic construct
  source 1..56: mol_type = other RNA
ctttcaagactaatagattgctccttacgaggagactgcttcctgtccaccgaggc

SEQ ID NO: 770 - RNA, 56 nt, synthetic construct
  source 1..56: mol_type = other RNA
ctttcaagactaatagattgctccttacgaggagacaggtacctcgcaagcacctt

SEQ ID NO: 771 - RNA, 56 nt, synthetic construct
  source 1..56: mol_type = other RNA
ctttcaagactaatagattgctccttacgaggagaccgaggtacctgaagcggctg

SEQ ID NO: 772 - RNA, 56 nt, synthetic construct
  source 1..56: mol_type = other RNA
ctttcaagactaatagattgctccttacgaggagaccagcctcctcggcctcgtgg

SEQ ID NO: 773 - RNA, 56 nt, synthetic construct
  source 1..56: mol_type = other RNA
ctttcaagactaatagattgctccttacgaggagacggcagcacgtggtacaggag

SEQ ID NO: 774 - RNA, 56 nt, synthetic construct
  source 1..56: mol_type = other RNA
ctttcaagactaatagattgctccttacgaggagacgcagcacgtggtacaggagc

SEQ ID NO: 775 - RNA, 56 nt, synthetic construct
  source 1..56: mol_type = other RNA
ctttcaagactaatagattgctccttacgaggagactctgggcacccgcctcacgc

SEQ ID NO: 776 - RNA, 56 nt, synthetic construct
  source 1..56: mol_type = other RNA
ctttcaagactaatagattgctccttacgaggagacctgggcacccgcctcacgcc

SEQ ID NO: 777 - RNA, 56 nt, synthetic construct
  source 1..56: mol_type = other RNA
ctttcaagactaatagattgctccttacgaggagactgggcacccgcctcacgcct

SEQ ID NO: 778 - RNA, 56 nt, synthetic construct
  source 1..56: mol_type = other RNA
ctttcaagactaatagattgctccttacgaggagaccccagtacatgtgcatcagg

SEQ ID NO: 779 - RNA, 56 nt, synthetic construct
  source 1..56: mol_type = other RNA
ctttcaagactaatagattgctccttacgaggagacgcccgccgcctccaaggcct

SEQ ID NO: 780 - RNA, 56 nt, synthetic construct
  source 1..56: mol_type = other RNA
ctttcaagactaatagattgctccttacgaggagacgaggcggcgggccaagactt

SEQ ID NO: 781 - RNA, 56 nt, synthetic construct
  source 1..56: mol_type = other RNA
ctttcaagactaatagattgctccttacgaggagactccctggacctccgcagcac

SEQ ID NO: 782 - RNA, 56 nt, synthetic construct
  source 1..56: mol_type = other RNA
ctttcaagactaatagattgctccttacgaggagacgcccctctggattggggagc

SEQ ID NO: 783 - RNA, 56 nt, synthetic construct
  source 1..56: mol_type = other RNA
ctttcaagactaatagattgctccttacgaggagaccccctctggattggggagcc

SEQ ID NO: 784 - RNA, 56 nt, synthetic construct
  source 1..56: mol_type = other RNA
ctttcaagactaatagattgctccttacgaggagacgggagcctcgtgggactcag

SEQ ID NO: 785 - RNA, 56 nt, synthetic construct
  source 1..56: mol_type = other RNA
ctttcaagactaatagattgctccttacgaggagacgtctccccatgctgctgcag

SEQ ID NO: 786 - RNA, 56 nt, synthetic construct
  source 1..56: mol_type = other RNA
ctttcaagactaatagattgctccttacgaggagactcctctgctgcctgaagtag

SEQ ID NO: 787 - RNA, 56 nt, synthetic construct
  source 1..56: mol_type = other RNA
ctttcaagactaatagattgctccttacgaggagacaggcagcagaggagaagttc

SEQ ID NO: 788 - RNA, 56 nt, synthetic construct
  source 1..56: mol_type = other RNA
ctttcaagactaatagattgctccttacgaggagacaaaggctcgatggtgaactt

SEQ ID NO: 789 - RNA, 56 nt, synthetic construct
  source 1..56: mol_type = other RNA
ctttcaagactaatagattgctccttacgaggagacgaaaggctcgatggtgaact

SEQ ID NO: 790 - RNA, 56 nt, synthetic construct
  source 1..56: mol_type = other RNA
ctttcaagactaatagattgctccttacgaggagacaccatcgagcctttcaaagc

SEQ ID NO: 791 - RNA, 56 nt, synthetic construct
  source 1..56: mol_type = other RNA
ctttcaagactaatagattgctccttacgaggagacgctttgaaaggctcgatggt

SEQ ID NO: 792 - RNA, 56 nt, synthetic construct
  source 1..56: mol_type = other RNA
ctttcaagactaatagattgctccttacgaggagacagggacttggctttgaaagg

SEQ ID NO: 793 - RNA, 56 nt, synthetic construct
  source 1..56: mol_type = other RNA
ctttcaagactaatagattgctccttacgaggagaccaaagccaagtccctgaagg

SEQ ID NO: 794 - RNA, 56 nt, synthetic construct
  source 1..56: mol_type = other RNA
ctttcaagactaatagattgctccttacgaggagacaaagccaagtccctgaagga

SEQ ID NO: 795 - RNA, 56 nt, synthetic construct
  source 1..56: mol_type = other RNA
ctttcaagactaatagattgctccttacgaggagaccacatccttcagggacttgg

SEQ ID NO: 796 - RNA, 56 nt, synthetic construct
  source 1..56: mol_type = other RNA
ctttcaagactaatagattgctccttacgaggagacccaggtcttccacatccttc

SEQ ID NO: 797 - RNA, 56 nt, synthetic construct
  source 1..56: mol_type = other RNA
ctttcaagactaatagattgctccttacgaggagaccccaggtcttccacatcctt

SEQ ID NO: 798 - RNA, 56 nt, synthetic construct
  source 1..56: mol_type = other RNA
ctttcaagactaatagattgctccttacgaggagacctcggaagacacagctgggg

SEQ ID NO: 799 - RNA, 56 nt, synthetic construct
  source 1..56: mol_type = other RNA
ctttcaagactaatagattgctccttacgaggagacggtcccgaacagcagggagc

SEQ ID NO: 800 - RNA, 56 nt, synthetic construct
  source 1..56: mol_type = other RNA
ctttcaagactaatagattgctccttacgaggagaccggacatggtgtccctccgg

SEQ ID NO: 801 - RNA, 56 nt, synthetic construct
  source 1..56: mol_type = other RNA
ctttcaagactaatagattgctccttacgaggagacacggctgccggggcccagca

SEQ ID NO: 802 - RNA, 56 nt, synthetic construct
  source 1..56: mol_type = other RNA
ctttcaagactaatagattgctccttacgaggagacggaggtgtcctcatgtggag

SEQ ID NO: 803 - RNA, 56 nt, synthetic construct
  source 1..56: mol_type = other RNA
ctttcaagactaatagattgctccttacgaggagacctggacactgaatgggatgg

SEQ ID NO: 804 - RNA, 56 nt, synthetic construct
  source 1..56: mol_type = other RNA
ctttcaagactaatagattgctccttacgaggagacagtgtccaggaacacctgca

SEQ ID NO: 805 - RNA, 56 nt, synthetic construct
  source 1..56: mol_type = other RNA
ctttcaagactaatagattgctccttacgaggagaccaggtgttcctggacactga

SEQ ID NO: 806 - RNA, 56 nt, synthetic construct
  source 1..56: mol_type = other RNA
ctttcaagactaatagattgctccttacgaggagacttgcaggtgttcctggacac

SEQ ID NO: 807 - RNA, 56 nt, synthetic construct
  source 1..56: mol_type = other RNA
ctttcaagactaatagattgctccttacgaggagacacggatcagcctgagatgat

SEQ ID NO: 808 - DNA, 56 bp, synthetic construct
  source 1..56: mol_type = other DNA
ctttcaagactaatagattgctccttacgaggagactggatatctgtgggacaaga

SEQ ID NO: 809 - DNA, 56 bp, synthetic construct
  source 1..56: mol_type = other DNA
ctttcaagactaatagattgctccttacgaggagactcccacagatatccagaacc

SEQ ID NO: 810 - DNA, 56 bp, synthetic construct
  source 1..56: mol_type = other DNA
ctttcaagactaatagattgctccttacgaggagacgagtctctcagctggtacac

SEQ ID NO: 811 - DNA, 56 bp, synthetic construct
  source 1..56: mol_type = other DNA
ctttcaagactaatagattgctccttacgaggagacagagtctctcagctggtaca

SEQ ID NO: 812 - DNA, 56 bp, synthetic construct
  source 1..56: mol_type = other DNA
ctttcaagactaatagattgctccttacgaggagactcactggatttagagtctct

SEQ ID NO: 813 - DNA, 56 bp, synthetic construct
  source 1..56: mol_type = other DNA
ctttcaagactaatagattgctccttacgaggagacagaatcaaaatcggtgaata

SEQ ID NO: 814 - DNA, 56 bp, synthetic construct
  source 1..56: mol_type = other DNA
ctttcaagactaatagattgctccttacgaggagacgagaatcaaaatcggtgaat

SEQ ID NO: 815 - DNA, 56 bp, synthetic construct
  source 1..56: mol_type = other DNA
ctttcaagactaatagattgctccttacgaggagacaccgattttgattctcaaac

SEQ ID NO: 816 - DNA, 56 bp, synthetic construct
  source 1..56: mol_type = other DNA
ctttcaagactaatagattgctccttacgaggagactttgagaatcaaaatcggtg

SEQ ID NO: 817 - DNA, 56 bp, synthetic construct
  source 1..56: mol_type = other DNA
ctttcaagactaatagattgctccttacgaggagacgtttgagaatcaaaatcggt

SEQ ID NO: 818 - DNA, 56 bp, synthetic construct
  source 1..56: mol_type = other DNA
ctttcaagactaatagattgctccttacgaggagactgattctcaaacaaatgtgt

SEQ ID NO: 819 - DNA, 56 bp, synthetic construct
  source 1..56: mol_type = other DNA
ctttcaagactaatagattgctccttacgaggagacgattctcaaacaaatgtgtc

SEQ ID NO: 820 - DNA, 56 bp, synthetic construct
  source 1..56: mol_type = other DNA
ctttcaagactaatagattgctccttacgaggagacattctcaaacaaatgtgtca

SEQ ID NO: 821 - DNA, 56 bp, synthetic construct
  source 1..56: mol_type = other DNA
ctttcaagactaatagattgctccttacgaggagactgacacatttgtttgagaat

SEQ ID NO: 822 - DNA, 56 bp, synthetic construct
  source 1..56: mol_type = other DNA
ctttcaagactaatagattgctccttacgaggagactcaaacaaatgtgtcacaaa

SEQ ID NO: 823 - DNA, 56 bp, synthetic construct
  source 1..56: mol_type = other DNA
ctttcaagactaatagattgctccttacgaggagacgtgacacatttgtttgagaa

SEQ ID NO: 824 - DNA, 56 bp, synthetic construct
  source 1..56: mol_type = other DNA
ctttcaagactaatagattgctccttacgaggagacctttgtgacacatttgtttg

SEQ ID NO: 825 - DNA, 56 bp, synthetic construct
  source 1..56: mol_type = other DNA
ctttcaagactaatagattgctccttacgaggagactgatgtgtatatcacagaca

SEQ ID NO: 826 - DNA, 56 bp, synthetic construct
  source 1..56: mol_type = other DNA
ctttcaagactaatagattgctccttacgaggagactctgtgatatacacatcaga

SEQ ID NO: 827 - DNA, 56 bp, synthetic construct
  source 1..56: mol_type = other DNA
ctttcaagactaatagattgctccttacgaggagacgtctgtgatatacacatcag

SEQ ID NO: 828 - DNA, 56 bp, synthetic construct
  source 1..56: mol_type = other DNA
ctttcaagactaatagattgctccttacgaggagactgtctgtgatatacacatca

SEQ ID NO: 829 - DNA, 56 bp, synthetic construct
  source 1..56: mol_type = other DNA
ctttcaagactaatagattgctccttacgaggagacaagtccatagacctcatgtc

SEQ ID NO: 830 - DNA, 56 bp, synthetic construct
  source 1..56: mol_type = other DNA
ctttcaagactaatagattgctccttacgaggagacctcttgaagtccatagacct

SEQ ID NO: 831 - DNA, 56 bp, synthetic construct
  source 1..56: mol_type = other DNA
ctttcaagactaatagattgctccttacgaggagacaagagcaacagtgctgtggc

SEQ ID NO: 832 - DNA, 56 bp, synthetic construct
  source 1..56: mol_type = other DNA
ctttcaagactaatagattgctccttacgaggagacctccaggccacagcactgtt

SEQ ID NO: 833 - DNA, 56 bp, synthetic construct
  source 1..56: mol_type = other DNA
ctttcaagactaatagattgctccttacgaggagacttgctccaggccacagcact

SEQ ID NO: 834 - DNA, 56 bp, synthetic construct
  source 1..56: mol_type = other DNA
ctttcaagactaatagattgctccttacgaggagacgttgctccaggccacagcac

SEQ ID NO: 835 - DNA, 56 bp, synthetic construct
  source 1..56: mol_type = other DNA
ctttcaagactaatagattgctccttacgaggagaccacatgcaaagtcagatttg

SEQ ID NO: 836 - DNA, 56 bp, synthetic construct
  source 1..56: mol_type = other DNA
ctttcaagactaatagattgctccttacgaggagacgcacatgcaaagtcagattt

SEQ ID NO: 837 - DNA, 56 bp, synthetic construct
  source 1..56: mol_type = other DNA
ctttcaagactaatagattgctccttacgaggagacgcatgtgcaaacgccttcaa

SEQ ID NO: 838 - DNA, 56 bp, synthetic construct
  source 1..56: mol_type = other DNA
ctttcaagactaatagattgctccttacgaggagacaaggcgtttgcacatgcaaa

SEQ ID NO: 839 - DNA, 56 bp, synthetic construct
  source 1..56: mol_type = other DNA
ctttcaagactaatagattgctccttacgaggagaccatgtgcaaacgccttcaac

SEQ ID NO: 840 - DNA, 56 bp, synthetic construct
  source 1..56: mol_type = other DNA
ctttcaagactaatagattgctccttacgaggagacttgaaggcgtttgcacatgc

SEQ ID NO: 841 - DNA, 56 bp, synthetic construct
  source 1..56: mol_type = other DNA
ctttcaagactaatagattgctccttacgaggagacaacaacagcattattccaga

SEQ ID NO: 842 - DNA, 56 bp, synthetic construct
  source 1..56: mol_type = other DNA
ctttcaagactaatagattgctccttacgaggagactggaataatgctgttgttga

SEQ ID NO: 843 - DNA, 56 bp, synthetic construct
  source 1..56: mol_type = other DNA
ctttcaagactaatagattgctccttacgaggagacttccagaagacaccttcttc

SEQ ID NO: 844 - DNA, 56 bp, synthetic construct
  source 1..56: mol_type = other DNA
ctttcaagactaatagattgctccttacgaggagaccagaagacaccttcttcccc

SEQ ID NO: 845 - DNA, 56 bp, synthetic construct
  source 1..56: mol_type = other DNA
ctttcaagactaatagattgctccttacgaggagaccctgggctggggaagaaggt

SEQ ID NO: 846 - DNA, 56 bp, synthetic construct
  source 1..56: mol_type = other DNA
ctttcaagactaatagattgctccttacgaggagacttccccagcccaggtaaggg

SEQ ID NO: 847 - DNA, 56 bp, synthetic construct
  source 1..56: mol_type = other DNA
ctttcaagactaatagattgctccttacgaggagaccccagcccaggtaagggcag

SEQ ID NO: 848 - DNA, 56 bp, synthetic construct
  source 1..56: mol_type = other DNA
ctttcaagactaatagattgctccttacgaggagactaaaaggaaaaacagacatt

SEQ ID NO: 849 - DNA, 56 bp, synthetic construct
  source 1..56: mol_type = other DNA
ctttcaagactaatagattgctccttacgaggagacctaaaaggaaaaacagacat

SEQ ID NO: 850 - DNA, 56 bp, synthetic construct
  source 1..56: mol_type = other DNA
ctttcaagactaatagattgctccttacgaggagacttccttttagaaagttcctg

SEQ ID NO: 851 - DNA, 56 bp, synthetic construct
  source 1..56: mol_type = other DNA
ctttcaagactaatagattgctccttacgaggagactccttttagaaagttcctgt

SEQ ID NO: 852 - DNA, 56 bp, synthetic construct
  source 1..56: mol_type = other DNA
ctttcaagactaatagattgctccttacgaggagacccttttagaaagttcctgtg

SEQ ID NO: 853 - DNA, 56 bp, synthetic construct
  source 1..56: mol_type = other DNA
ctttcaagactaatagattgctccttacgaggagaccttttagaaagttcctgtga

SEQ ID NO: 854 - DNA, 56 bp, synthetic construct
  source 1..56: mol_type = other DNA
ctttcaagactaatagattgctccttacgaggagactagaaagttcctgtgatgtc

SEQ ID NO: 855 - DNA, 56 bp, synthetic construct
  source 1..56: mol_type = other DNA
ctttcaagactaatagattgctccttacgaggagacagaaagttcctgtgatgtca

SEQ ID NO: 856 - DNA, 56 bp, synthetic construct
  source 1..56: mol_type = other DNA
ctttcaagactaatagattgctccttacgaggagacgaaagttcctgtgatgtcaa

SEQ ID NO: 857 - DNA, 56 bp, synthetic construct
  source 1..56: mol_type = other DNA
ctttcaagactaatagattgctccttacgaggagacacatcacaggaactttctaa

SEQ ID NO: 858 - DNA, 56 bp, synthetic construct
  source 1..56: mol_type = other DNA
ctttcaagactaatagattgctccttacgaggagacctgtgatgtcaagctggtcg

SEQ ID NO: 859 - DNA, 56 bp, synthetic construct
  source 1..56: mol_type = other DNA
ctttcaagactaatagattgctccttacgaggagactcgaccagcttgacatcaca

SEQ ID NO: 860 - DNA, 56 bp, synthetic construct
  source 1..56: mol_type = other DNA
ctttcaagactaatagattgctccttacgaggagacctcgaccagcttgacatcac

SEQ ID NO: 861 - DNA, 56 bp, synthetic construct
  source 1..56: mol_type = other DNA
ctttcaagactaatagattgctccttacgaggagactctcgaccagcttgacatca

SEQ ID NO: 862 - DNA, 56 bp, synthetic construct
  source 1..56: mol_type = other DNA
ctttcaagactaatagattgctccttacgaggagacaaagcttttctcgaccagct

SEQ ID NO: 863 - DNA, 56 bp, synthetic construct
  source 1..56: mol_type = other DNA
ctttcaagactaatagattgctccttacgaggagaccaaagcttttctcgaccagc

SEQ ID NO: 864 - DNA, 56 bp, synthetic construct
  source 1..56: mol_type = other DNA
ctttcaagactaatagattgctccttacgaggagaccctgtttcaaagcttttctc

SEQ ID NO: 865 - DNA, 56 bp, synthetic construct
  source 1..56: mol_type = other DNA
ctttcaagactaatagattgctccttacgaggagacgaaacaggtaagacaggggt

SEQ ID NO: 866 - DNA, 56 bp, synthetic construct
  source 1..56: mol_type = other DNA
ctttcaagactaatagattgctccttacgaggagacaaacaggtaagacaggggtc

SEQ ID NO: 867 - DNA, 57 bp, synthetic construct
  source 1..57: mol_type = other DNA
gctggggaccgatcctgattgctcgctgcggcgagactggatatctgtgggacaaga

SEQ ID NO: 868 - DNA, 57 bp, synthetic construct
  source 1..57: mol_type = other DNA
gctggggaccgatcctgattgctcgctgcggcgagactcccacagatatccagaacc

SEQ ID NO: 869 - DNA, 57 bp, synthetic construct
  source 1..57: mol_type = other DNA
gctggggaccgatcctgattgctcgctgcggcgagacgagtctctcagctggtacac

SEQ ID NO: 870 - DNA, 57 bp, synthetic construct
  source 1..57: mol_type = other DNA
gctggggaccgatcctgattgctcgctgcggcgagacagagtctctcagctggtaca

SEQ ID NO: 871 - DNA, 57 bp, synthetic construct
  source 1..57: mol_type = other DNA
gctggggaccgatcctgattgctcgctgcggcgagactcactggatttagagtctct

SEQ ID NO: 872 - DNA, 57 bp, synthetic construct
  source 1..57: mol_type = other DNA
gctggggaccgatcctgattgctcgctgcggcgagacagaatcaaaatcggtgaata

SEQ ID NO: 873 - DNA, 57 bp, synthetic construct
  source 1..57: mol_type = other DNA
gctggggaccgatcctgattgctcgctgcggcgagacgagaatcaaaatcggtgaat

SEQ ID NO: 874 - DNA, 57 bp, synthetic construct
  source 1..57: mol_type = other DNA
gctggggaccgatcctgattgctcgctgcggcgagacaccgattttgattctcaaac

SEQ ID NO: 875 - DNA, 57 bp, synthetic construct
  source 1..57: mol_type = other DNA
gctggggaccgatcctgattgctcgctgcggcgagactttgagaatcaaaatcggtg

SEQ ID NO: 876 - DNA, 57 bp, synthetic construct
  source 1..57: mol_type = other DNA
gctggggaccgatcctgattgctcgctgcggcgagacgtttgagaatcaaaatcggt

SEQ ID NO: 877 - DNA, 57 bp, synthetic construct
  source 1..57: mol_type = other DNA
gctggggaccgatcctgattgctcgctgcggcgagactgattctcaaacaaatgtgt

SEQ ID NO: 878 - DNA, 57 bp, synthetic construct
  source 1..57: mol_type = other DNA
gctggggaccgatcctgattgctcgctgcggcgagacgattctcaaacaaatgtgtc

SEQ ID NO: 879 - DNA, 57 bp, synthetic construct
  source 1..57: mol_type = other DNA
gctggggaccgatcctgattgctcgctgcggcgagacattctcaaacaaatgtgtca

SEQ ID NO: 880 - DNA, 57 bp, synthetic construct
  source 1..57: mol_type = other DNA
gctggggaccgatcctgattgctcgctgcggcgagactgacacatttgtttgagaat

SEQ ID NO: 881 - DNA, 57 bp, synthetic construct
  source 1..57: mol_type = other DNA
gctggggaccgatcctgattgctcgctgcggcgagactcaaacaaatgtgtcacaaa

SEQ ID NO: 882 - DNA, 57 bp, synthetic construct
  source 1..57: mol_type = other DNA
gctggggaccgatcctgattgctcgctgcggcgagacgtgacacatttgtttgagaa

SEQ ID NO: 883 - DNA, 57 bp, synthetic construct
  source 1..57: mol_type = other DNA
gctggggaccgatcctgattgctcgctgcggcgagacctttgtgacacatttgtttg

SEQ ID NO: 884 - DNA, 57 bp, synthetic construct
  source 1..57: mol_type = other DNA
gctggggaccgatcctgattgctcgctgcggcgagactgatgtgtatatcacagaca

SEQ ID NO: 885 - DNA, 57 bp, synthetic construct
  source 1..57: mol_type = other DNA
gctggggaccgatcctgattgctcgctgcggcgagactctgtgatatacacatcaga

SEQ ID NO: 886 - DNA, 57 bp, synthetic construct
  source 1..57: mol_type = other DNA
gctggggaccgatcctgattgctcgctgcggcgagacgtctgtgatatacacatcag

SEQ ID NO: 887 - DNA, 57 bp, synthetic construct
  source 1..57: mol_type = other DNA
gctggggaccgatcctgattgctcgctgcggcgagactgtctgtgatatacacatca

SEQ ID NO: 888 - DNA, 57 bp, synthetic construct
  source 1..57: mol_type = other DNA
gctggggaccgatcctgattgctcgctgcggcgagacaagtccatagacctcatgtc

SEQ ID NO: 889 - DNA, 57 bp, synthetic construct
  source 1..57: mol_type = other DNA
gctggggaccgatcctgattgctcgctgcggcgagacctcttgaagtccatagacct

SEQ ID NO: 890 - DNA, 57 bp, synthetic construct
  source 1..57: mol_type = other DNA
gctggggaccgatcctgattgctcgctgcggcgagacaagagcaacagtgctgtggc

SEQ ID NO: 891 - DNA, 57 bp, synthetic construct
  source 1..57: mol_type = other DNA
gctggggaccgatcctgattgctcgctgcggcgagacctccaggccacagcactgtt

SEQ ID NO: 892 - DNA, 57 bp, synthetic construct
  source 1..57: mol_type = other DNA
gctggggaccgatcctgattgctcgctgcggcgagacttgctccaggccacagcact

SEQ ID NO: 893 - DNA, 57 bp, synthetic construct
  source 1..57: mol_type = other DNA
gctggggaccgatcctgattgctcgctgcggcgagacgttgctccaggccacagcac

SEQ ID NO: 894 - DNA, 57 bp, synthetic construct
  source 1..57: mol_type = other DNA
gctggggaccgatcctgattgctcgctgcggcgagaccacatgcaaagtcagatttg

SEQ ID NO: 895 - DNA, 57 bp, synthetic construct
  source 1..57: mol_type = other DNA
gctggggaccgatcctgattgctcgctgcggcgagacgcacatgcaaagtcagattt

SEQ ID NO: 896 - DNA, 57 bp, synthetic construct
  source 1..57: mol_type = other DNA
gctggggaccgatcctgattgctcgctgcggcgagacgcatgtgcaaacgccttcaa

SEQ ID NO: 897 - DNA, 57 bp, synthetic construct
  source 1..57: mol_type = other DNA
gctggggaccgatcctgattgctcgctgcggcgagacaaggcgtttgcacatgcaaa

SEQ ID NO: 898 - DNA, 57 bp, synthetic construct
  source 1..57: mol_type = other DNA
gctggggaccgatcctgattgctcgctgcggcgagaccatgtgcaaacgccttcaac

SEQ ID NO: 899 - DNA, 57 bp, synthetic construct
  source 1..57: mol_type = other DNA
gctggggaccgatcctgattgctcgctgcggcgagacttgaaggcgtttgcacatgc

SEQ ID NO: 900 - DNA, 57 bp, synthetic construct
  source 1..57: mol_type = other DNA
gctggggaccgatcctgattgctcgctgcggcgagacaacaacagcattattccaga

SEQ ID NO: 901 - DNA, 57 bp, synthetic construct
  source 1..57: mol_type = other DNA
gctggggaccgatcctgattgctcgctgcggcgagactggaataatgctgttgttga

SEQ ID NO: 902 - DNA, 57 bp, synthetic construct
  source 1..57: mol_type = other DNA
gctggggaccgatcctgattgctcgctgcggcgagacttccagaagacaccttcttc

SEQ ID NO: 903 - DNA, 57 bp, synthetic construct
  source 1..57: mol_type = other DNA
gctggggaccgatcctgattgctcgctgcggcgagaccagaagacaccttcttcccc

SEQ ID NO: 904 - DNA, 57 bp, synthetic construct
  source 1..57: mol_type = other DNA
gctggggaccgatcctgattgctcgctgcggcgagaccctgggctggggaagaaggt

SEQ ID NO: 905 - DNA, 57 bp, synthetic construct
  source 1..57: mol_type = other DNA
gctggggaccgatcctgattgctcgctgcggcgagacttccccagcccaggtaaggg

SEQ ID NO: 906 - DNA, 57 bp, synthetic construct
  source 1..57: mol_type = other DNA
gctggggaccgatcctgattgctcgctgcggcgagaccccagcccaggtaagggcag

SEQ ID NO: 907 - DNA, 57 bp, synthetic construct
  source 1..57: mol_type = other DNA
gctggggaccgatcctgattgctcgctgcggcgagactaaaaggaaaaacagacatt

SEQ ID NO: 908 - DNA, 57 bp, synthetic construct
  source 1..57: mol_type = other DNA
gctggggaccgatcctgattgctcgctgcggcgagacctaaaaggaaaaacagacat

SEQ ID NO: 909 - DNA, 57 bp, synthetic construct
  source 1..57: mol_type = other DNA
gctggggaccgatcctgattgctcgctgcggcgagacttccttttagaaagttcctg

SEQ ID NO: 910 - DNA, 57 bp, synthetic construct
  source 1..57: mol_type = other DNA
gctggggaccgatcctgattgctcgctgcggcgagactccttttagaaagttcctgt

SEQ ID NO: 911 - DNA, 57 bp, synthetic construct
  source 1..57: mol_type = other DNA
gctggggaccgatcctgattgctcgctgcggcgagacccttttagaaagttcctgtg

SEQ ID NO: 912 - DNA, 57 bp, synthetic construct
  source 1..57: mol_type = other DNA
gctggggaccgatcctgattgctcgctgcggcgagaccttttagaaagttcctgtga

SEQ ID NO: 913 - DNA, 57 bp, synthetic construct
  source 1..57: mol_type = other DNA
gctggggaccgatcctgattgctcgctgcggcgagactagaaagttcctgtgatgtc

SEQ ID NO: 914 - DNA, 57 bp, synthetic construct
  source 1..57: mol_type = other DNA
gctggggaccgatcctgattgctcgctgcggcgagacagaaagttcctgtgatgtca

SEQ ID NO: 915 - DNA, 57 bp, synthetic construct
  source 1..57: mol_type = other DNA
gctggggaccgatcctgattgctcgctgcggcgagacgaaagttcctgtgatgtcaa

SEQ ID NO: 916 - DNA, 57 bp, synthetic construct
  source 1..57: mol_type = other DNA
gctggggaccgatcctgattgctcgctgcggcgagacacatcacaggaactttctaa

SEQ ID NO: 917 - DNA, 57 bp, synthetic construct
  source 1..57: mol_type = other DNA
gctggggaccgatcctgattgctcgctgcggcgagacctgtgatgtcaagctggtcg

SEQ ID NO: 918 - DNA, 57 bp, synthetic construct
  source 1..57: mol_type = other DNA
gctggggaccgatcctgattgctcgctgcggcgagactcgaccagcttgacatcaca

SEQ ID NO: 919 - DNA, 57 bp, synthetic construct
  source 1..57: mol_type = other DNA
gctggggaccgatcctgattgctcgctgcggcgagacctcgaccagcttgacatcac

SEQ ID NO: 920 - DNA, 57 bp, synthetic construct
  source 1..57: mol_type = other DNA
gctggggaccgatcctgattgctcgctgcggcgagactctcgaccagcttgacatca

SEQ ID NO: 921 - DNA, 57 bp, synthetic construct
  source 1..57: mol_type = other DNA
gctggggaccgatcctgattgctcgctgcggcgagacaaagcttttctcgaccagct

SEQ ID NO: 922 - DNA, 57 bp, synthetic construct
  source 1..57: mol_type = other DNA
gctggggaccgatcctgattgctcgctgcggcgagaccaaagcttttctcgaccagc

SEQ ID NO: 923 - DNA, 57 bp, synthetic construct
  source 1..57: mol_type = other DNA
gctggggaccgatcctgattgctcgctgcggcgagaccctgtttcaaagcttttctc

SEQ ID NO: 924 - DNA, 57 bp, synthetic construct
  source 1..57: mol_type = other DNA
gctggggaccgatcctgattgctcgctgcggcgagacgaaacaggtaagacaggggt

SEQ ID NO: 925 - DNA, 57 bp, synthetic construct
  source 1..57: mol_type = other DNA
gctggggaccgatcctgattgctcgctgcggcgagacaaacaggtaagacaggggtc

SEQ ID NO: 926 - DNA, 56 bp, synthetic construct
  source 1..56: mol_type = other DNA
ctttcaagactaatagattgctccttacgaggagacaatataagtggaggcgtcgc

SEQ ID NO: 927 - DNA, 56 bp, synthetic construct
  source 1..56: mol_type = other DNA
ctttcaagactaatagattgctccttacgaggagacatataagtggaggcgtcgcg

SEQ ID NO: 928 - DNA, 56 bp, synthetic construct
  source 1..56: mol_type = other DNA
ctttcaagactaatagattgctccttacgaggagacaggaatgcccgccagcgcga

SEQ ID NO: 929 - DNA, 56 bp, synthetic construct
  source 1..56: mol_type = other DNA
ctttcaagactaatagattgctccttacgaggagacctgaagctgacagcattcgg

SEQ ID NO: 930 - DNA, 56 bp, synthetic construct
  source 1..56: mol_type = other DNA
ctttcaagactaatagattgctccttacgaggagacgggccgagatgtctcgctcc

SEQ ID NO: 931 - DNA, 56 bp, synthetic construct
  source 1..56: mol_type = other DNA
ctttcaagactaatagattgctccttacgaggagacgctgtgctcgcgctactctc

SEQ ID NO: 932 - DNA, 56 bp, synthetic construct
  source 1..56: mol_type = other DNA
ctttcaagactaatagattgctccttacgaggagacctggcctggaggctatccag

SEQ ID NO: 933 - DNA, 56 bp, synthetic construct
  source 1..56: mol_type = other DNA
ctttcaagactaatagattgctccttacgaggagactggcctggaggctatccagc

SEQ ID NO: 934 - DNA, 56 bp, synthetic construct
  source 1..56: mol_type = other DNA
ctttcaagactaatagattgctccttacgaggagacatgtgtcttttcccgatatt

SEQ ID NO: 935 - DNA, 56 bp, synthetic construct
  source 1..56: mol_type = other DNA
ctttcaagactaatagattgctccttacgaggagactcccgatattcctcaggtac

SEQ ID NO: 936 - DNA, 56 bp, synthetic construct
  source 1..56: mol_type = other DNA
ctttcaagactaatagattgctccttacgaggagaccccgatattcctcaggtact

SEQ ID NO: 937 - DNA, 56 bp, synthetic construct
  source 1..56: mol_type = other DNA
ctttcaagactaatagattgctccttacgaggagacccgatattcctcaggtactc

SEQ ID NO: 938 - DNA, 56 bp, synthetic construct
  source 1..56: mol_type = other DNA
ctttcaagactaatagattgctccttacgaggagacgagtacctgaggaatatcgg

SEQ ID NO: 939 - DNA, 56 bp, synthetic construct
  source 1..56: mol_type = other DNA
ctttcaagactaatagattgctccttacgaggagacggagtacctgaggaatatcg

SEQ ID NO: 940 - DNA, 56 bp, synthetic construct
  source 1..56: mol_type = other DNA
ctttcaagactaatagattgctccttacgaggagacctcaggtactccaaagattc

SEQ ID NO: 941 - DNA, 56 bp, synthetic construct
  source 1..56: mol_type = other DNA
ctttcaagactaatagattgctccttacgaggagacaggtttactcacgtcatcca

SEQ ID NO: 942 - DNA, 56 bp, synthetic construct
  source 1..56: mol_type = other DNA
ctttcaagactaatagattgctccttacgaggagacactcacgtcatccagcagag

SEQ ID NO: 943 - DNA, 56 bp, synthetic construct
  source 1..56: mol_type = other DNA
ctttcaagactaatagattgctccttacgaggagacctcacgtcatccagcagaga

SEQ ID NO: 944 - DNA, 56 bp, synthetic construct
  source 1..56: mol_type = other DNA
ctttcaagactaatagattgctccttacgaggagactctgctggatgacgtgagta

SEQ ID NO: 945 - DNA, 56 bp, synthetic construct
  source 1..56: mol_type = other DNA
ctttcaagactaatagattgctccttacgaggagaccattctctgctggatgacgt

SEQ ID NO: 946 - DNA, 56 bp, synthetic construct
  source 1..56: mol_type = other DNA
ctttcaagactaatagattgctccttacgaggagacccattctctgctggatgacg

SEQ ID NO: 947 - DNA, 56 bp, synthetic construct
  source 1..56: mol_type = other DNA
ctttcaagactaatagattgctccttacgaggagacactttccattctctgctgga

SEQ ID NO: 948 - DNA, 56 bp, synthetic construct
  source 1..56: mol_type = other DNA
ctttcaagactaatagattgctccttacgaggagacgactttccattctctgctgg

SEQ ID NO: 949 - DNA, 56 bp, synthetic construct
  source 1..56: mol_type = other DNA
ctttcaagactaatagattgctccttacgaggagacaggaaatttgactttccatt

SEQ ID NO: 950 - DNA, 56 bp, synthetic construct
  source 1..56: mol_type = other DNA
ctttcaagactaatagattgctccttacgaggagaccctgaattgctatgtgtctg

SEQ ID NO: 951 - DNA, 56 bp, synthetic construct
  source 1..56: mol_type = other DNA
ctttcaagactaatagattgctccttacgaggagacctgaattgctatgtgtctgg

SEQ ID NO: 952 - DNA, 56 bp, synthetic construct
  source 1..56: mol_type = other DNA
ctttcaagactaatagattgctccttacgaggagacctatgtgtctgggtttcatc

SEQ ID NO: 953 - DNA, 56 bp, synthetic construct
  source 1..56: mol_type = other DNA
ctttcaagactaatagattgctccttacgaggagacaatgtcggatggatgaaacc

SEQ ID NO: 954 - DNA, 56 bp, synthetic construct
  source 1..56: mol_type = other DNA
ctttcaagactaatagattgctccttacgaggagaccatccatccgacattgaagt

SEQ ID NO: 955 - DNA, 56 bp, synthetic construct
  source 1..56: mol_type = other DNA
ctttcaagactaatagattgctccttacgaggagacatccatccgacattgaagtt

SEQ ID NO: 956 - DNA, 56 bp, synthetic construct
  source 1..56: mol_type = other DNA
ctttcaagactaatagattgctccttacgaggagacagtaagtcaacttcaatgtc

SEQ ID NO: 957 - DNA, 56 bp, synthetic construct
  source 1..56: mol_type = other DNA
ctttcaagactaatagattgctccttacgaggagacttcagtaagtcaacttcaat

SEQ ID NO: 958 - DNA, 56 bp, synthetic construct
  source 1..56: mol_type = other DNA
ctttcaagactaatagattgctccttacgaggagacaagttgacttactgaagaat

SEQ ID NO: 959 - DNA, 56 bp, synthetic construct
  source 1..56: mol_type = other DNA
ctttcaagactaatagattgctccttacgaggagacacttactgaagaatggagag

SEQ ID NO: 960 - DNA, 56 bp, synthetic construct
  source 1..56: mol_type = other DNA
ctttcaagactaatagattgctccttacgaggagactctctccattcttcagtaag

SEQ ID NO: 961 - DNA, 56 bp, synthetic construct
  source 1..56: mol_type = other DNA
ctttcaagactaatagattgctccttacgaggagacctgaagaatggagagagaat

SEQ ID NO: 962 - DNA, 56 bp, synthetic construct
  source 1..56: mol_type = other DNA
ctttcaagactaatagattgctccttacgaggagacaattctctctccattcttca

SEQ ID NO: 963 - DNA, 56 bp, synthetic construct
  source 1..56: mol_type = other DNA
ctttcaagactaatagattgctccttacgaggagaccaattctctctccattcttc

SEQ ID NO: 964 - DNA, 56 bp, synthetic construct
  source 1..56: mol_type = other DNA
ctttcaagactaatagattgctccttacgaggagactcaattctctctccattctt

SEQ ID NO: 965 - DNA, 56 bp, synthetic construct
  source 1..56: mol_type = other DNA
ctttcaagactaatagattgctccttacgaggagacttcaattctctctccattct

SEQ ID NO: 966 - DNA, 56 bp, synthetic construct
  source 1..56: mol_type = other DNA
ctttcaagactaatagattgctccttacgaggagacaaaaagtggagcattcagac

SEQ ID NO: 967 - DNA, 56 bp, synthetic construct
  source 1..56: mol_type = other DNA
ctttcaagactaatagattgctccttacgaggagacctgaaagacaagtctgaatg

SEQ ID NO: 968 - DNA, 56 bp, synthetic construct
  source 1..56: mol_type = other DNA
ctttcaagactaatagattgctccttacgaggagacagacttgtctttcagcaagg

SEQ ID NO: 969 - DNA, 56 bp, synthetic construct
  source 1..56: mol_type = other DNA
ctttcaagactaatagattgctccttacgaggagactctttcagcaaggactggtc

SEQ ID NO: 970 - DNA, 56 bp, synthetic construct
  source 1..56: mol_type = other DNA
ctttcaagactaatagattgctccttacgaggagaccagcaaggactggtctttct

SEQ ID NO: 971 - DNA, 56 bp, synthetic construct
  source 1..56: mol_type = other DNA
ctttcaagactaatagattgctccttacgaggagacagcaaggactggtctttcta

SEQ ID NO: 972 - DNA, 56 bp, synthetic construct
  source 1..56: mol_type = other DNA
ctttcaagactaatagattgctccttacgaggagacctatctcttgtactacactg

SEQ ID NO: 973 - DNA, 56 bp, synthetic construct
  source 1..56: mol_type = other DNA
ctttcaagactaatagattgctccttacgaggagactatctcttgtactacactga

SEQ ID NO: 974 - DNA, 56 bp, synthetic construct
  source 1..56: mol_type = other DNA
ctttcaagactaatagattgctccttacgaggagacagtgtagtacaagagataga

SEQ ID NO: 975 - DNA, 56 bp, synthetic construct
  source 1..56: mol_type = other DNA
ctttcaagactaatagattgctccttacgaggagactactacactgaattcacccc

SEQ ID NO: 976 - DNA, 56 bp, synthetic construct
  source 1..56: mol_type = other DNA
ctttcaagactaatagattgctccttacgaggagacagtgggggtgaattcagtgt

SEQ ID NO: 977 - DNA, 56 bp, synthetic construct
  source 1..56: mol_type = other DNA
ctttcaagactaatagattgctccttacgaggagaccagtgggggtgaattcagtg

SEQ ID NO: 978 - DNA, 56 bp, synthetic construct
  source 1..56: mol_type = other DNA
ctttcaagactaatagattgctccttacgaggagactcagtgggggtgaattcagt

SEQ ID NO: 979 - DNA, 56 bp, synthetic construct
  source 1..56: mol_type = other DNA
ctttcaagactaatagattgctccttacgaggagacttcagtgggggtgaattcag

SEQ ID NO: 980 - DNA, 56 bp, synthetic construct
  source 1..56: mol_type = other DNA
ctttcaagactaatagattgctccttacgaggagacacccccactgaaaaagatga

SEQ ID NO: 981 - DNA, 56 bp, synthetic construct
  source 1..56: mol_type = other DNA
ctttcaagactaatagattgctccttacgaggagacacacggcaggcatactcatc

SEQ ID NO: 982 - DNA, 56 bp, synthetic construct
  source 1..56: mol_type = other DNA
ctttcaagactaatagattgctccttacgaggagacggctgtgacaaagtcacatg

SEQ ID NO: 983 - DNA, 56 bp, synthetic construct
  source 1..56: mol_type = other DNA
ctttcaagactaatagattgctccttacgaggagacgtcacagcccaagatagtta

SEQ ID NO: 984 - DNA, 56 bp, synthetic construct
  source 1..56: mol_type = other DNA
ctttcaagactaatagattgctccttacgaggagactcacagcccaagatagttaa

SEQ ID NO: 985 - DNA, 56 bp, synthetic construct
  source 1..56: mol_type = other DNA
ctttcaagactaatagattgctccttacgaggagacactatcttgggctgtgacaa

SEQ ID NO: 986 - DNA, 56 bp, synthetic construct
  source 1..56: mol_type = other DNA
ctttcaagactaatagattgctccttacgaggagacccccacttaactatcttggg

SEQ ID NO: 987 - DNA, 57 bp, synthetic construct
  source 1..57: mol_type = other DNA
gctggggaccgatcctgattgctcgctgcggcgagacaatataagtggaggcgtcgc

SEQ ID NO: 988 - DNA, 57 bp, synthetic construct
  source 1..57: mol_type = other DNA
gctggggaccgatcctgattgctcgctgcggcgagacatataagtggaggcgtcgcg

SEQ ID NO: 989 - DNA, 57 bp, synthetic construct
  source 1..57: mol_type = other DNA
gctggggaccgatcctgattgctcgctgcggcgagacaggaatgcccgccagcgcga

SEQ ID NO: 990 - DNA, 57 bp, synthetic construct
  source 1..57: mol_type = other DNA
gctggggaccgatcctgattgctcgctgcggcgagacctgaagctgacagcattcgg

SEQ ID NO: 991 - DNA, 57 bp, synthetic construct
  source 1..57: mol_type = other DNA
gctggggaccgatcctgattgctcgctgcggcgagacgggccgagatgtctcgctcc

SEQ ID NO: 992 - DNA, 57 bp, synthetic construct
  source 1..57: mol_type = other DNA
gctggggaccgatcctgattgctcgctgcggcgagacgctgtgctcgcgctactctc

SEQ ID NO: 993 - DNA, 57 bp, synthetic construct
  source 1..57: mol_type = other DNA
gctggggaccgatcctgattgctcgctgcggcgagacctggcctggaggctatccag

SEQ ID NO: 994 - DNA, 57 bp, synthetic construct
  source 1..57: mol_type = other DNA
gctggggaccgatcctgattgctcgctgcggcgagactggcctggaggctatccagc

SEQ ID NO: 995 - DNA, 57 bp, synthetic construct
  source 1..57: mol_type = other DNA
gctggggaccgatcctgattgctcgctgcggcgagacatgtgtcttttcccgatatt

SEQ ID NO: 996 - DNA, 57 bp, synthetic construct
  source 1..57: mol_type = other DNA
gctggggaccgatcctgattgctcgctgcggcgagactcccgatattcctcaggtac

SEQ ID NO: 997 - DNA, 57 bp, synthetic construct
  source 1..57: mol_type = other DNA
gctggggaccgatcctgattgctcgctgcggcgagaccccgatattcctcaggtact

SEQ ID NO: 998 - DNA, 57 bp, synthetic construct
  source 1..57: mol_type = other DNA
gctggggaccgatcctgattgctcgctgcggcgagacccgatattcctcaggtactc

SEQ ID NO: 999 - DNA, 57 bp, synthetic construct
  source 1..57: mol_type = other DNA
gctggggaccgatcctgattgctcgctgcggcgagacgagtacctgaggaatatcgg

SEQ ID NO: 1000 - DNA, 57 bp, synthetic construct
  source 1..57: mol_type = other DNA
gctggggaccgatcctgattgctcgctgcggcgagacggagtacctgaggaatatcg

SEQ ID NO: 1001 - DNA, 57 bp, synthetic construct
  source 1..57: mol_type = other DNA
gctggggaccgatcctgattgctcgctgcggcgagacctcaggtactccaaagattc

SEQ ID NO: 1002 - DNA, 57 bp, synthetic construct
  source 1..57: mol_type = other DNA
gctggggaccgatcctgattgctcgctgcggcgagacaggtttactcacgtcatcca

SEQ ID NO: 1003 - DNA, 57 bp, synthetic construct
  source 1..57: mol_type = other DNA
gctggggaccgatcctgattgctcgctgcggcgagacactcacgtcatccagcagag

SEQ ID NO: 1004 - DNA, 57 bp, synthetic construct
  source 1..57: mol_type = other DNA
gctggggaccgatcctgattgctcgctgcggcgagacctcacgtcatccagcagaga

SEQ ID NO: 1005 - DNA, 57 bp, synthetic construct
  source 1..57: mol_type = other DNA
gctggggaccgatcctgattgctcgctgcggcgagactctgctggatgacgtgagta

SEQ ID NO: 1006 - DNA, 57 bp, synthetic construct
  source 1..57: mol_type = other DNA
gctggggaccgatcctgattgctcgctgcggcgagaccattctctgctggatgacgt

SEQ ID NO: 1007 - DNA, 57 bp, synthetic construct
  source 1..57: mol_type = other DNA
gctggggaccgatcctgattgctcgctgcggcgagacccattctctgctggatgacg

SEQ ID NO: 1008 - DNA, 57 bp, synthetic construct
  source 1..57: mol_type = other DNA
gctggggaccgatcctgattgctcgctgcggcgagacactttccattctctgctgga

SEQ ID NO: 1009 - DNA, 57 bp, synthetic construct
  source 1..57: mol_type = other DNA
gctggggaccgatcctgattgctcgctgcggcgagacgactttccattctctgctgg

SEQ ID NO: 1010 - DNA, 57 bp, synthetic construct
  source 1..57: mol_type = other DNA
gctggggaccgatcctgattgctcgctgcggcgagacaggaaatttgactttccatt

SEQ ID NO: 1011 - DNA, 57 bp, synthetic construct
  source 1..57: mol_type = other DNA
gctggggaccgatcctgattgctcgctgcggcgagaccctgaattgctatgtgtctg

SEQ ID NO: 1012 - DNA, 57 bp, synthetic construct
  source 1..57: mol_type = other DNA
gctggggaccgatcctgattgctcgctgcggcgagacctgaattgctatgtgtctgg

SEQ ID NO: 1013 - DNA, 57 bp, synthetic construct
  source 1..57: mol_type = other DNA
gctggggaccgatcctgattgctcgctgcggcgagacctatgtgtctgggtttcatc

SEQ ID NO: 1014 - DNA, 57 bp, synthetic construct
  source 1..57: mol_type = other DNA
gctggggaccgatcctgattgctcgctgcggcgagacaatgtcggatggatgaaacc

SEQ ID NO: 1015 - DNA, 57 bp, synthetic construct
  source 1..57: mol_type = other DNA
gctggggaccgatcctgattgctcgctgcggcgagaccatccatccgacattgaagt

SEQ ID NO: 1016 - DNA, 57 bp, synthetic construct
  source 1..57: mol_type = other DNA
gctggggaccgatcctgattgctcgctgcggcgagacatccatccgacattgaagtt

SEQ ID NO: 1017 - DNA, 57 bp, synthetic construct
  source 1..57: mol_type = other DNA
gctggggaccgatcctgattgctcgctgcggcgagacagtaagtcaacttcaatgtc

SEQ ID NO: 1018 - DNA, 57 bp, synthetic construct
  source 1..57: mol_type = other DNA
gctggggaccgatcctgattgctcgctgcggcgagacttcagtaagtcaacttcaat

SEQ ID NO: 1019 - DNA, 57 bp, synthetic construct
  source 1..57: mol_type = other DNA
gctggggaccgatcctgattgctcgctgcggcgagacaagttgacttactgaagaat

SEQ ID NO: 1020 - DNA, 57 bp, synthetic construct
  source 1..57: mol_type = other DNA
gctggggaccgatcctgattgctcgctgcggcgagacacttactgaagaatggagag

SEQ ID NO: 1021 - DNA, 57 bp, synthetic construct
  source 1..57: mol_type = other DNA
gctggggaccgatcctgattgctcgctgcggcgagactctctccattcttcagtaag

SEQ ID NO: 1022 - DNA, 57 bp, synthetic construct
  source 1..57: mol_type = other DNA
gctggggaccgatcctgattgctcgctgcggcgagacctgaagaatggagagagaat

SEQ ID NO: 1023 - DNA, 57 bp, synthetic construct
  source 1..57: mol_type = other DNA
gctggggaccgatcctgattgctcgctgcggcgagacaattctctctccattcttca

SEQ ID NO: 1024 - DNA, 57 bp, synthetic construct
  source 1..57: mol_type = other DNA
gctggggaccgatcctgattgctcgctgcggcgagaccaattctctctccattcttc

SEQ ID NO: 1025 - DNA, 57 bp, synthetic construct
  source 1..57: mol_type = other DNA
gctggggaccgatcctgattgctcgctgcggcgagactcaattctctctccattctt

SEQ ID NO: 1026 - DNA, 57 bp, synthetic construct
  source 1..57: mol_type = other DNA
gctggggaccgatcctgattgctcgctgcggcgagacttcaattctctctccattct

SEQ ID NO: 1027 - DNA, 57 bp, synthetic construct
  source 1..57: mol_type = other DNA
gctggggaccgatcctgattgctcgctgcggcgagacaaaaagtggagcattcagac

SEQ ID NO: 1028 - DNA, 57 bp, synthetic construct
  source 1..57: mol_type = other DNA
gctggggaccgatcctgattgctcgctgcggcgagacctgaaagacaagtctgaatg

SEQ ID NO: 1029 - DNA, 57 bp, synthetic construct
  source 1..57: mol_type = other DNA
gctggggaccgatcctgattgctcgctgcggcgagacagacttgtctttcagcaagg

SEQ ID NO: 1030 - DNA, 57 bp, synthetic construct
  source 1..57: mol_type = other DNA
gctggggaccgatcctgattgctcgctgcggcgagactctttcagcaaggactggtc

SEQ ID NO: 1031 - DNA, 57 bp, synthetic construct
  source 1..57: mol_type = other DNA
gctggggaccgatcctgattgctcgctgcggcgagaccagcaaggactggtctttct

SEQ ID NO: 1032 - DNA, 57 bp, synthetic construct
  source 1..57: mol_type = other DNA
gctggggaccgatcctgattgctcgctgcggcgagacagcaaggactggtctttcta

SEQ ID NO: 1033 - DNA, 57 bp, synthetic construct
  source 1..57: mol_type = other DNA
gctggggaccgatcctgattgctcgctgcggcgagacctatctcttgtactacactg

SEQ ID NO: 1034 - DNA, 57 bp, synthetic construct
  source 1..57: mol_type = other DNA
gctggggaccgatcctgattgctcgctgcggcgagactatctcttgtactacactga

SEQ ID NO: 1035 - DNA, 57 bp, synthetic construct
  source 1..57: mol_type = other DNA
gctggggaccgatcctgattgctcgctgcggcgagacagtgtagtacaagagataga

SEQ ID NO: 1036 - DNA, 57 bp, synthetic construct
  source 1..57: mol_type = other DNA
gctggggaccgatcctgattgctcgctgcggcgagactactacactgaattcacccc

SEQ ID NO: 1037 - DNA, 57 bp, synthetic construct
  source 1..57: mol_type = other DNA
gctggggaccgatcctgattgctcgctgcggcgagacagtgggggtgaattcagtgt

SEQ ID NO: 1038 - DNA, 57 bp, synthetic construct
  source 1..57: mol_type = other DNA
gctggggaccgatcctgattgctcgctgcggcgagaccagtgggggtgaattcagtg

SEQ ID NO: 1039 - DNA, 57 bp, synthetic construct
  source 1..57: mol_type = other DNA
gctggggaccgatcctgattgctcgctgcggcgagactcagtgggggtgaattcagt

SEQ ID NO: 1040 - DNA, 57 bp, synthetic construct
  source 1..57: mol_type = other DNA
gctggggaccgatcctgattgctcgctgcggcgagacttcagtgggggtgaattcag

SEQ ID NO: 1041 - DNA, 57 bp, synthetic construct
  source 1..57: mol_type = other DNA
gctggggaccgatcctgattgctcgctgcggcgagacacccccactgaaaaagatga

SEQ ID NO: 1042 - DNA, 57 bp, synthetic construct
  source 1..57: mol_type = other DNA
gctggggaccgatcctgattgctcgctgcggcgagacacacggcaggcatactcatc

SEQ ID NO: 1043 - DNA, 57 bp, synthetic construct
  source 1..57: mol_type = other DNA
gctggggaccgatcctgattgctcgctgcggcgagacggctgtgacaaagtcacatg

SEQ ID NO: 1044 - DNA, 57 bp, synthetic construct
  source 1..57: mol_type = other DNA
gctggggaccgatcctgattgctcgctgcggcgagacgtcacagcccaagatagtta

SEQ ID NO: 1045 - DNA, 57 bp, synthetic construct
  source 1..57: mol_type = other DNA
gctggggaccgatcctgattgctcgctgcggcgagactcacagcccaagatagttaa

SEQ ID NO: 1046 - DNA, 57 bp, synthetic construct
  source 1..57: mol_type = other DNA
gctggggaccgatcctgattgctcgctgcggcgagacactatcttgggctgtgacaa

SEQ ID NO: 1047 - DNA, 57 bp, synthetic construct
  source 1..57: mol_type = other DNA
gctggggaccgatcctgattgctcgctgcggcgagacccccacttaactatcttggg

SEQ ID NO: 1048 - RNA, 57 nt, synthetic construct
  source 1..57: mol_type = other RNA
gctggggaccgatcctgattgctcgctgcggcgagacctacacaatgcgttgcctgg

SEQ ID NO: 1049 - RNA, 57 nt, synthetic construct
  source 1..57: mol_type = other RNA
gctggggaccgatcctgattgctcgctgcggcgagacgggctctgacaggtaggacc

SEQ ID NO: 1050 - RNA, 57 nt, synthetic construct
  source 1..57: mol_type = other RNA
gctggggaccgatcctgattgctcgctgcggcgagactgtaggaatcccagccaggc

SEQ ID NO: 1051 - RNA, 57 nt, synthetic construct
  source 1..57: mol_type = other RNA
gctggggaccgatcctgattgctcgctgcggcgagaccctggctccacgccctgctg

SEQ ID NO: 1052 - RNA, 57 nt, synthetic construct
  source 1..57: mol_type = other RNA
gctggggaccgatcctgattgctcgctgcggcgagacgggaagctgagggcacgagg

SEQ ID NO: 1053 - RNA, 57 nt, synthetic construct
  source 1..57: mol_type = other RNA
gctggggaccgatcctgattgctcgctgcggcgagacacagcgatgctgaccccctg

SEQ ID NO: 1054 - RNA, 57 nt, synthetic construct
  source 1..57: mol_type = other RNA
gctggggaccgatcctgattgctcgctgcggcgagacttaacagcgatgctgacccc

SEQ ID NO: 1055 - RNA, 57 nt, synthetic construct
  source 1..57: mol_type = other RNA
gctggggaccgatcctgattgctcgctgcggcgagactatgaccagatggacctggc

SEQ ID NO: 1056 - RNA, 57 nt, synthetic construct
  source 1..57: mol_type = other RNA
gctggggaccgatcctgattgctcgctgcggcgagacgggcccctagaaggtggcta

SEQ ID NO: 1057 - RNA, 57 nt, synthetic construct
  source 1..57: mol_type = other RNA
gctggggaccgatcctgattgctcgctgcggcgagactaggggccccaactccatgg

SEQ ID NO: 1058 - RNA, 57 nt, synthetic construct
  source 1..57: mol_type = other RNA
gctggggaccgatcctgattgctcgctgcggcgagacagaagctccaggtagccacc

SEQ ID NO: 1059 - RNA, 57 nt, synthetic construct
  source 1..57: mol_type = other RNA
gctggggaccgatcctgattgctcgctgcggcgagactccagccaggtccatctggt

SEQ ID NO: 1060 - RNA, 57 nt, synthetic construct
  source 1..57: mol_type = other RNA
gctggggaccgatcctgattgctcgctgcggcgagacttctccagccaggtccatct

SEQ ID NO: 1061 - DNA, 37 bp, synthetic construct
  source 1..37: mol_type = other DNA
attgctccttacgaggagactggatatctgtgggaca

SEQ ID NO: 1062 - DNA, 37 bp, synthetic construct
  source 1..37: mol_type = other DNA
attgctccttacgaggagactcccacagatatccaga

SEQ ID NO: 1063 - DNA, 37 bp, synthetic construct
  source 1..37: mol_type = other DNA
attgctccttacgaggagacgagtctctcagctggta

SEQ ID NO: 1064 - DNA, 37 bp, synthetic construct
  source 1..37: mol_type = other DNA
attgctccttacgaggagacagagtctctcagctggt

SEQ ID NO: 1065 - DNA, 37 bp, synthetic construct
  source 1..37: mol_type = other DNA
attgctccttacgaggagactcactggatttagagtc

SEQ ID NO: 1066 - DNA, 37 bp, synthetic construct
  source 1..37: mol_type = other DNA
attgctccttacgaggagacagaatcaaaatcggtga

SEQ ID NO: 1067 - DNA, 37 bp, synthetic construct
  source 1..37: mol_type = other DNA
attgctccttacgaggagacgagaatcaaaatcggtg

SEQ ID NO: 1068 - DNA, 37 bp, synthetic construct
  source 1..37: mol_type = other DNA
attgctccttacgaggagacaccgattttgattctca

SEQ ID NO: 1069 - DNA, 37 bp, synthetic construct
  source 1..37: mol_type = other DNA
attgctccttacgaggagactttgagaatcaaaatcg

SEQ ID NO: 1070 - DNA, 37 bp, synthetic construct
  source 1..37: mol_type = other DNA
attgctccttacgaggagacgtttgagaatcaaaatc

SEQ ID NO: 1071 - DNA, 37 bp, synthetic construct
  source 1..37: mol_type = other DNA
attgctccttacgaggagactgattctcaaacaaatg

SEQ ID NO: 1072 - DNA, 37 bp, synthetic construct
  source 1..37: mol_type = other DNA
attgctccttacgaggagacgattctcaaacaaatgt

SEQ ID NO: 1073 - DNA, 37 bp, synthetic construct
  source 1..37: mol_type = other DNA
attgctccttacgaggagacattctcaaacaaatgtg

SEQ ID NO: 1074 - DNA, 37 bp, synthetic construct
  source 1..37: mol_type = other DNA
attgctccttacgaggagactgacacatttgtttgag

SEQ ID NO: 1075 - DNA, 37 bp, synthetic construct
  source 1..37: mol_type = other DNA
attgctccttacgaggagactcaaacaaatgtgtcac

SEQ ID NO: 1076 - DNA, 37 bp, synthetic construct
  source 1..37: mol_type = other DNA
attgctccttacgaggagacgtgacacatttgtttga

SEQ ID NO: 1077 - DNA, 37 bp, synthetic construct
  source 1..37: mol_type = other DNA
attgctccttacgaggagacctttgtgacacatttgt

SEQ ID NO: 1078 - DNA, 37 bp, synthetic construct
  source 1..37: mol_type = other DNA
attgctccttacgaggagactgatgtgtatatcacag

SEQ ID NO: 1079 - DNA, 37 bp, synthetic construct
  source 1..37: mol_type = other DNA
attgctccttacgaggagactctgtgatatacacatc

SEQ ID NO: 1080 - DNA, 37 bp, synthetic construct
  source 1..37: mol_type = other DNA
attgctccttacgaggagacgtctgtgatatacacat

SEQ ID NO: 1081 - DNA, 37 bp, synthetic construct
  source 1..37: mol_type = other DNA
attgctccttacgaggagactgtctgtgatatacaca

SEQ ID NO: 1082 - DNA, 37 bp, synthetic construct
  source 1..37: mol_type = other DNA
attgctccttacgaggagacaagtccatagacctcat

SEQ ID NO: 1083 - DNA, 37 bp, synthetic construct
  source 1..37: mol_type = other DNA
attgctccttacgaggagacctcttgaagtccataga

SEQ ID NO: 1084 - DNA, 37 bp, synthetic construct
  source 1..37: mol_type = other DNA
attgctccttacgaggagacaagagcaacagtgctgt

SEQ ID NO: 1085 - DNA, 37 bp, synthetic construct
  source 1..37: mol_type = other DNA
attgctccttacgaggagacctccaggccacagcact

SEQ ID NO: 1086 - DNA, 37 bp, synthetic construct
  source 1..37: mol_type = other DNA
attgctccttacgaggagacttgctccaggccacagc

SEQ ID NO: 1087 - DNA, 37 bp, synthetic construct
  source 1..37: mol_type = other DNA
attgctccttacgaggagacgttgctccaggccacag

SEQ ID NO: 1088 - DNA, 37 bp, synthetic construct
  source 1..37: mol_type = other DNA
attgctccttacgaggagaccacatgcaaagtcagat

SEQ ID NO: 1089 - DNA, 37 bp, synthetic construct
  source 1..37: mol_type = other DNA
attgctccttacgaggagacgcacatgcaaagtcaga

SEQ ID NO: 1090 - DNA, 37 bp, synthetic construct
  source 1..37: mol_type = other DNA
attgctccttacgaggagacgcatgtgcaaacgcctt

SEQ ID NO: 1091 - DNA, 37 bp, synthetic construct
  source 1..37: mol_type = other DNA
attgctccttacgaggagacaaggcgtttgcacatgc

SEQ ID NO: 1092 - DNA, 37 bp, synthetic construct
  source 1..37: mol_type = other DNA
attgctccttacgaggagaccatgtgcaaacgccttc

SEQ ID NO: 1093 - DNA, 37 bp, synthetic construct
  source 1..37: mol_type = other DNA
attgctccttacgaggagacttgaaggcgtttgcaca

SEQ ID NO: 1094 - DNA, 37 bp, synthetic construct
  source 1..37: mol_type = other DNA
attgctccttacgaggagacaacaacagcattattcc

SEQ ID NO: 1095 - DNA, 37 bp, synthetic construct
  source 1..37: mol_type = other DNA
attgctccttacgaggagactggaataatgctgttgt

SEQ ID NO: 1096 - DNA, 37 bp, synthetic construct
  source 1..37: mol_type = other DNA
attgctccttacgaggagacttccagaagacaccttc

SEQ ID NO: 1097 - DNA, 37 bp, synthetic construct
  source 1..37: mol_type = other DNA
attgctccttacgaggagaccagaagacaccttcttc

SEQ ID NO: 1098 - DNA, 37 bp, synthetic construct
  source 1..37: mol_type = other DNA
attgctccttacgaggagaccctgggctggggaagaa

SEQ ID NO: 1099 - DNA, 37 bp, synthetic construct
  source 1..37: mol_type = other DNA
attgctccttacgaggagacttccccagcccaggtaa

SEQ ID NO: 1100 - DNA, 37 bp, synthetic construct
  source 1..37: mol_type = other DNA
attgctccttacgaggagaccccagcccaggtaaggg

SEQ ID NO: 1101 - DNA, 37 bp, synthetic construct
  source 1..37: mol_type = other DNA
attgctccttacgaggagactaaaaggaaaaacagac

SEQ ID NO: 1102 - DNA, 37 bp, synthetic construct
  source 1..37: mol_type = other DNA
attgctccttacgaggagacctaaaaggaaaaacaga

SEQ ID NO: 1103 - DNA, 37 bp, synthetic construct
  source 1..37: mol_type = other DNA
attgctccttacgaggagacttccttttagaaagttc

SEQ ID NO: 1104 - DNA, 37 bp, synthetic construct
  source 1..37: mol_type = other DNA
attgctccttacgaggagactccttttagaaagttcc

SEQ ID NO: 1105 - DNA, 37 bp, synthetic construct
  source 1..37: mol_type = other DNA
attgctccttacgaggagacccttttagaaagttcct

SEQ ID NO: 1106 - DNA, 37 bp, synthetic construct
  source 1..37: mol_type = other DNA
attgctccttacgaggagaccttttagaaagttcctg

SEQ ID NO: 1107 - DNA, 37 bp, synthetic construct
  source 1..37: mol_type = other DNA
attgctccttacgaggagactagaaagttcctgtgat

SEQ ID NO: 1108 - DNA, 37 bp, synthetic construct
  source 1..37: mol_type = other DNA
attgctccttacgaggagacagaaagttcctgtgatg

SEQ ID NO: 1109 - DNA, 37 bp, synthetic construct
  source 1..37: mol_type = other DNA
attgctccttacgaggagacgaaagttcctgtgatgt

SEQ ID NO: 1110 - DNA, 37 bp, synthetic construct
  source 1..37: mol_type = other DNA
attgctccttacgaggagacacatcacaggaactttc

SEQ ID NO: 1111 - DNA, 37 bp, synthetic construct
  source 1..37: mol_type = other DNA
attgctccttacgaggagacctgtgatgtcaagctgg

SEQ ID NO: 1112 - DNA, 37 bp, synthetic construct
  source 1..37: mol_type = other DNA
attgctccttacgaggagactcgaccagcttgacatc

SEQ ID NO: 1113 - DNA, 37 bp, synthetic construct
  source 1..37: mol_type = other DNA
attgctccttacgaggagacctcgaccagcttgacat

SEQ ID NO: 1114 - DNA, 37 bp, synthetic construct
  source 1..37: mol_type = other DNA
attgctccttacgaggagactctcgaccagcttgaca

SEQ ID NO: 1115 - DNA, 37 bp, synthetic construct
  source 1..37: mol_type = other DNA
attgctccttacgaggagacaaagcttttctcgacca

SEQ ID NO: 1116 - DNA, 37 bp, synthetic construct
  source 1..37: mol_type = other DNA
attgctccttacgaggagaccaaagcttttctcgacc

SEQ ID NO: 1117 - DNA, 37 bp, synthetic construct
  source 1..37: mol_type = other DNA
attgctccttacgaggagaccctgtttcaaagctttt

SEQ ID NO: 1118 - DNA, 37 bp, synthetic construct
  source 1..37: mol_type = other DNA
attgctccttacgaggagacgaaacaggtaagacagg

SEQ ID NO: 1119 - DNA, 37 bp, synthetic construct
  source 1..37: mol_type = other DNA
attgctccttacgaggagacaaacaggtaagacaggg

SEQ ID NO: 1120 - DNA, 37 bp, synthetic construct
  source 1..37: mol_type = other DNA
attgctccttacgaggagaccatccatccgacattga

SEQ ID NO: 1121 - DNA, 37 bp, synthetic construct
  source 1..37: mol_type = other DNA
attgctccttacgaggagacatccatccgacattgaa

SEQ ID NO: 1122 - DNA, 37 bp, synthetic construct
  source 1..37: mol_type = other DNA
attgctccttacgaggagacagtaagtcaacttcaat

SEQ ID NO: 1123 - DNA, 37 bp, synthetic construct
  source 1..37: mol_type = other DNA
attgctccttacgaggagacttcagtaagtcaacttc

SEQ ID NO: 1124 - DNA, 37 bp, synthetic construct
  source 1..37: mol_type = other DNA
attgctccttacgaggagacaagttgacttactgaag

SEQ ID NO: 1125 - DNA, 37 bp, synthetic construct
  source 1..37: mol_type = other DNA
attgctccttacgaggagacacttactgaagaatgga

SEQ ID NO: 1126 - DNA, 37 bp, synthetic construct
  source 1..37: mol_type = other DNA
attgctccttacgaggagactctctccattcttcagt

SEQ ID NO: 1127 - DNA, 37 bp, synthetic construct
  source 1..37: mol_type = other DNA
attgctccttacgaggagacctgaagaatggagagag

SEQ ID NO: 1128 - DNA, 37 bp, synthetic construct
  source 1..37: mol_type = other DNA
attgctccttacgaggagacaattctctctccattct

SEQ ID NO: 1129 - DNA, 37 bp, synthetic construct
  source 1..37: mol_type = other DNA
attgctccttacgaggagaccaattctctctccattc

SEQ ID NO: 1130 - DNA, 37 bp, synthetic construct
  source 1..37: mol_type = other DNA
attgctccttacgaggagactcaattctctctccatt

SEQ ID NO: 1131 - DNA, 37 bp, synthetic construct
  source 1..37: mol_type = other DNA
attgctccttacgaggagacttcaattctctctccat

SEQ ID NO: 1132 - DNA, 37 bp, synthetic construct
  source 1..37: mol_type = other DNA
attgctccttacgaggagacaaaaagtggagcattca

SEQ ID NO: 1133 - DNA, 37 bp, synthetic construct
  source 1..37: mol_type = other DNA
attgctccttacgaggagacctgaaagacaagtctga

SEQ ID NO: 1134 - DNA, 37 bp, synthetic construct
  source 1..37: mol_type = other DNA
attgctccttacgaggagacagacttgtctttcagca

SEQ ID NO: 1135 - DNA, 37 bp, synthetic construct
  source 1..37: mol_type = other DNA
attgctccttacgaggagactctttcagcaaggactg

SEQ ID NO: 1136 - DNA, 37 bp, synthetic construct
  source 1..37: mol_type = other DNA
attgctccttacgaggagaccagcaaggactggtctt

SEQ ID NO: 1137 - DNA, 37 bp, synthetic construct
  source 1..37: mol_type = other DNA
attgctccttacgaggagacagcaaggactggtcttt

SEQ ID NO: 1138 - DNA, 37 bp, synthetic construct
  source 1..37: mol_type = other DNA
attgctccttacgaggagacctatctcttgtactaca

SEQ ID NO: 1139 - DNA, 37 bp, synthetic construct
  source 1..37: mol_type = other DNA
attgctccttacgaggagactatctcttgtactacac

SEQ ID NO: 1140 - DNA, 37 bp, synthetic construct
  source 1..37: mol_type = other DNA
attgctccttacgaggagacagtgtagtacaagagat

SEQ ID NO: 1141 - DNA, 37 bp, synthetic construct
  source 1..37: mol_type = other DNA
attgctccttacgaggagactactacactgaattcac

SEQ ID NO: 1142 - DNA, 37 bp, synthetic construct
  source 1..37: mol_type = other DNA
attgctccttacgaggagacagtgggggtgaattcag

SEQ ID NO: 1143 - DNA, 37 bp, synthetic construct
  source 1..37: mol_type = other DNA
attgctccttacgaggagaccagtgggggtgaattca

SEQ ID NO: 1144 - DNA, 37 bp, synthetic construct
  source 1..37: mol_type = other DNA
attgctccttacgaggagactcagtgggggtgaattc

SEQ ID NO: 1145 - DNA, 37 bp, synthetic construct
  source 1..37: mol_type = other DNA
attgctccttacgaggagacttcagtgggggtgaatt

SEQ ID NO: 1146 - DNA, 37 bp, synthetic construct
  source 1..37: mol_type = other DNA
attgctccttacgaggagacacccccactgaaaaaga

SEQ ID NO: 1147 - DNA, 37 bp, synthetic construct
  source 1..37: mol_type = other DNA
attgctccttacgaggagacacacggcaggcatactc

SEQ ID NO: 1148 - DNA, 37 bp, synthetic construct
  source 1..37: mol_type = other DNA
attgctccttacgaggagacggctgtgacaaagtcac

SEQ ID NO: 1149 - DNA, 37 bp, synthetic construct
  source 1..37: mol_type = other DNA
attgctccttacgaggagacgtcacagcccaagatag

SEQ ID NO: 1150 - DNA, 37 bp, synthetic construct
  source 1..37: mol_type = other DNA
attgctccttacgaggagactcacagcccaagatagt

SEQ ID NO: 1151 - DNA, 37 bp, synthetic construct
  source 1..37: mol_type = other DNA
attgctccttacgaggagacactatcttgggctgtga

SEQ ID NO: 1152 - DNA, 37 bp, synthetic construct
  source 1..37: mol_type = other DNA
attgctccttacgaggagacccccacttaactatctt

SEQ ID NO: 1153 - RNA, 37 nt, synthetic construct
  source 1..37: mol_type = other RNA
attgctccttacgaggagacctacacaatgcgttgcc

SEQ ID NO: 1154 - RNA, 37 nt, synthetic construct
  source 1..37: mol_type = other RNA
attgctccttacgaggagacgggctctgacaggtagg

SEQ ID NO: 1155 - RNA, 37 nt, synthetic construct
  source 1..37: mol_type = other RNA
attgctccttacgaggagactgtaggaatcccagcca

SEQ ID NO: 1156 - RNA, 37 nt, synthetic construct
  source 1..37: mol_type = other RNA
attgctccttacgaggagaccctggctccacgccctg

SEQ ID NO: 1157 - RNA, 37 nt, synthetic construct
  source 1..37: mol_type = other RNA
attgctccttacgaggagacgggaagctgagggcacg

SEQ ID NO: 1158 - RNA, 37 nt, synthetic construct
  source 1..37: mol_type = other RNA
attgctccttacgaggagacacagcgatgctgacccc

SEQ ID NO: 1159 - RNA, 37 nt, synthetic construct
  source 1..37: mol_type = other RNA
attgctccttacgaggagacttaacagcgatgctgac

SEQ ID NO: 1160 - RNA, 37 nt, synthetic construct
  source 1..37: mol_type = other RNA
attgctccttacgaggagactatgaccagatggacct

SEQ ID NO: 1161 - RNA, 37 nt, synthetic construct
  source 1..37: mol_type = other RNA
attgctccttacgaggagacgggcccctagaaggtgg

SEQ ID NO: 1162 - RNA, 37 nt, synthetic construct
  source 1..37: mol_type = other RNA
attgctccttacgaggagactaggggccccaactcca

SEQ ID NO: 1163 - RNA, 37 nt, synthetic construct
  source 1..37: mol_type = other RNA
attgctccttacgaggagacagaagctccaggtagcc

SEQ ID NO: 1164 - RNA, 37 nt, synthetic construct
  source 1..37: mol_type = other RNA
attgctccttacgaggagactccagccaggtccatct

SEQ ID NO: 1165 - RNA, 37 nt, synthetic construct
  source 1..37: mol_type = other RNA
attgctccttacgaggagacttctccagccaggtcca

SEQ ID NO: 1166 - RNA, 37 nt, synthetic construct
  source 1..37: mol_type = other RNA
attgctccttacgaggagacagcaggctgttgtgtga

SEQ ID NO: 1167 - RNA, 37 nt, synthetic construct
  source 1..37: mol_type = other RNA
attgctccttacgaggagaccatgtcacacaacagcc

SEQ ID NO: 1168 - RNA, 37 nt, synthetic construct
  source 1..37: mol_type = other RNA
attgctccttacgaggagactgtgacatggaaggtga

SEQ ID NO: 1169 - RNA, 37 nt, synthetic construct
  source 1..37: mol_type = other RNA
attgctccttacgaggagacatcaccttccatgtcac

SEQ ID NO: 1170 - RNA, 37 nt, synthetic construct
  source 1..37: mol_type = other RNA
attgctccttacgaggagacgcataagcctccctggt

SEQ ID NO: 1171 - RNA, 37 nt, synthetic construct
  source 1..37: mol_type = other RNA
attgctccttacgaggagaccaggactcccagctgga

SEQ ID NO: 1172 - RNA, 37 nt, synthetic construct
  source 1..37: mol_type = other RNA
attgctccttacgaggagacctcaggccctccagctg

SEQ ID NO: 1173 - RNA, 37 nt, synthetic construct
  source 1..37: mol_type = other RNA
attgctccttacgaggagactgctggcatctccatac

SEQ ID NO: 1174 - RNA, 37 nt, synthetic construct
  source 1..37: mol_type = other RNA
attgctccttacgaggagactgcccaacttctgctgg

SEQ ID NO: 1175 - RNA, 37 nt, synthetic construct
  source 1..37: mol_type = other RNA
attgctccttacgaggagacctgcccaacttctgctg

SEQ ID NO: 1176 - RNA, 37 nt, synthetic construct
  source 1..37: mol_type = other RNA
attgctccttacgaggagactctgcccaacttctgct

SEQ ID NO: 1177 - RNA, 37 nt, synthetic construct
  source 1..37: mol_type = other RNA
attgctccttacgaggagactgacttttctgcccaac

SEQ ID NO: 1178 - RNA, 37 nt, synthetic construct
  source 1..37: mol_type = other RNA
attgctccttacgaggagacctgacttttctgcccaa

SEQ ID NO: 1179 - RNA, 37 nt, synthetic construct
  source 1..37: mol_type = other RNA
attgctccttacgaggagactctgacttttctgccca

SEQ ID NO: 1180 - RNA, 37 nt, synthetic construct
  source 1..37: mol_type = other RNA
attgctccttacgaggagacccagaggagcttccggc

SEQ ID NO: 1181 - RNA, 37 nt, synthetic construct
  source 1..37: mol_type = other RNA
attgctccttacgaggagacaggtctgccggaagctc

SEQ ID NO: 1182 - RNA, 37 nt, synthetic construct
  source 1..37: mol_type = other RNA
attgctccttacgaggagaccggcagacctgaagcac

SEQ ID NO: 1183 - RNA, 37 nt, synthetic construct
  source 1..37: mol_type = other RNA
attgctccttacgaggagaccagtgcttcaggtctgc

SEQ ID NO: 1184 - RNA, 37 nt, synthetic construct
  source 1..37: mol_type = other RNA
attgctccttacgaggagacaacagcgcaggcagtgg

SEQ ID NO: 1185 - RNA, 37 nt, synthetic construct
  source 1..37: mol_type = other RNA
attgctccttacgaggagacaaccaggagccagcctc

SEQ ID NO: 1186 - RNA, 37 nt, synthetic construct
  source 1..37: mol_type = other RNA
attgctccttacgaggagactccaggcgcatctggcc

SEQ ID NO: 1187 - RNA, 37 nt, synthetic construct
  source 1..37: mol_type = other RNA
attgctccttacgaggagacctccaggcgcatctggc

SEQ ID NO: 1188 - RNA, 37 nt, synthetic construct
  source 1..37: mol_type = other RNA
attgctccttacgaggagactctccaggcgcatctgg

SEQ ID NO: 1189 - RNA, 37 nt, synthetic construct
  source 1..37: mol_type = other RNA
attgctccttacgaggagacctccagttcctcgttga

SEQ ID NO: 1190 - RNA, 37 nt, synthetic construct
  source 1..37: mol_type = other RNA
attgctccttacgaggagactccagttcctcgttgag

SEQ ID NO: 1191 - RNA, 37 nt, synthetic construct
  source 1..37: mol_type = other RNA
attgctccttacgaggagacaggcagctcaacgagga

SEQ ID NO: 1192 - RNA, 37 nt, synthetic construct
  source 1..37: mol_type = other RNA
attgctccttacgaggagacctcgttgagctgcctga

SEQ ID NO: 1193 - RNA, 37 nt, synthetic construct
  source 1..37: mol_type = other RNA
attgctccttacgaggagacagctgcctgaatctccc

SEQ ID NO: 1194 - RNA, 37 nt, synthetic construct
  source 1..37: mol_type = other RNA
attgctccttacgaggagacgtccccaccatctccac

SEQ ID NO: 1195 - RNA, 37 nt, synthetic construct
  source 1..37: mol_type = other RNA
attgctccttacgaggagactccccaccatctccact

SEQ ID NO: 1196 - RNA, 37 nt, synthetic construct
  source 1..37: mol_type = other RNA
attgctccttacgaggagacccagagcccatggggca

SEQ ID NO: 1197 - RNA, 37 nt, synthetic construct
  source 1..37: mol_type = other RNA
attgctccttacgaggagacgccagagcccatggggc

SEQ ID NO: 1198 - RNA, 37 nt, synthetic construct
  source 1..37: mol_type = other RNA
attgctccttacgaggagaccagcctcagagatttgc

SEQ ID NO: 1199 - RNA, 37 nt, synthetic construct
  source 1..37: mol_type = other RNA
attgctccttacgaggagacggaggccgtggacagtg

SEQ ID NO: 1200 - RNA, 37 nt, synthetic construct
  source 1..37: mol_type = other RNA
attgctccttacgaggagacactgtccacggcctccc

SEQ ID NO: 1201 - RNA, 37 nt, synthetic construct
  source 1..37: mol_type = other RNA
attgctccttacgaggagacgctccatcagccactga

SEQ ID NO: 1202 - RNA, 37 nt, synthetic construct
  source 1..37: mol_type = other RNA
attgctccttacgaggagacaggcatgctgggcaggt

SEQ ID NO: 1203 - RNA, 37 nt, synthetic construct
  source 1..37: mol_type = other RNA
attgctccttacgaggagacctcgggaggtcagggca

SEQ ID NO: 1204 - RNA, 37 nt, synthetic construct
  source 1..37: mol_type = other RNA
attgctccttacgaggagacgctcgggaggtcagggc

SEQ ID NO: 1205 - RNA, 37 nt, synthetic construct
  source 1..37: mol_type = other RNA
attgctccttacgaggagacgagacctctccagctgc

SEQ ID NO: 1206 - RNA, 37 nt, synthetic construct
  source 1..37: mol_type = other RNA
attgctccttacgaggagacttggagacctctccagc

SEQ ID NO: 1207 - RNA, 37 nt, synthetic construct
  source 1..37: mol_type = other RNA
attgctccttacgaggagacgaagcttgttggagacc

SEQ ID NO: 1208 - RNA, 37 nt, synthetic construct
  source 1..37: mol_type = other RNA
attgctccttacgaggagacggaagcttgttggagac

SEQ ID NO: 1209 - RNA, 37 nt, synthetic construct
  source 1..37: mol_type = other RNA
attgctccttacgaggagactggaagcttgttggaga

SEQ ID NO: 1210 - RNA, 37 nt, synthetic construct
  source 1..37: mol_type = other RNA
attgctccttacgaggagactaccgctcactgcagga

SEQ ID NO: 1211 - RNA, 37 nt, synthetic construct
  source 1..37: mol_type = other RNA
attgctccttacgaggagacctgctgctcctctccag

SEQ ID NO: 1212 - RNA, 37 nt, synthetic construct
  source 1..37: mol_type = other RNA
attgctccttacgaggagacccgctccaggctcttgc

SEQ ID NO: 1213 - RNA, 37 nt, synthetic construct
  source 1..37: mol_type = other RNA
attgctccttacgaggagactgcccagtccggggtgg

SEQ ID NO: 1214 - RNA, 37 nt, synthetic construct
  source 1..37: mol_type = other RNA
attgctccttacgaggagacggccagctgccgttctg

SEQ ID NO: 1215 - RNA, 37 nt, synthetic construct
  source 1..37: mol_type = other RNA
attgctccttacgaggagacgcagccaacagcacctc

SEQ ID NO: 1216 - RNA, 37 nt, synthetic construct
  source 1..37: mol_type = other RNA
attgctccttacgaggagacgctgccaaggagcaccg

SEQ ID NO: 1217 - RNA, 37 nt, synthetic construct
  source 1..37: mol_type = other RNA
attgctccttacgaggagaccccagcacagcaatcac

SEQ ID NO: 1218 - RNA, 37 nt, synthetic construct
  source 1..37: mol_type = other RNA
attgctccttacgaggagacgcccagcacagcaatca

SEQ ID NO: 1219 - RNA, 37 nt, synthetic construct
  source 1..37: mol_type = other RNA
attgctccttacgaggagacctgtgctgggcaaagct

SEQ ID NO: 1220 - RNA, 37 nt, synthetic construct
  source 1..37: mol_type = other RNA
attgctccttacgaggagacccctgaccagctttgcc

SEQ ID NO: 1221 - RNA, 37 nt, synthetic construct
  source 1..37: mol_type = other RNA
attgctccttacgaggagacggctggggcagtgagcc

SEQ ID NO: 1222 - RNA, 37 nt, synthetic construct
  source 1..37: mol_type = other RNA
attgctccttacgaggagactggccggcttccccagt

SEQ ID NO: 1223 - RNA, 37 nt, synthetic construct
  source 1..37: mol_type = other RNA
attgctccttacgaggagaccccagtacgactttgtc

SEQ ID NO: 1224 - RNA, 37 nt, synthetic construct
  source 1..37: mol_type = other RNA
attgctccttacgaggagacgtcttctctgtcccctg

SEQ ID NO: 1225 - RNA, 37 nt, synthetic construct
  source 1..37: mol_type = other RNA
attgctccttacgaggagactcttctctgtcccctgc

SEQ ID NO: 1226 - RNA, 37 nt, synthetic construct
  source 1..37: mol_type = other RNA
attgctccttacgaggagactctgtcccctgccattg

SEQ ID NO: 1227 - RNA, 37 nt, synthetic construct
  source 1..37: mol_type = other RNA
attgctccttacgaggagacaagcaatggcaggggac

SEQ ID NO: 1228 - RNA, 37 nt, synthetic construct
  source 1..37: mol_type = other RNA
attgctccttacgaggagaccttgaaccgtccggggg

SEQ ID NO: 1229 - RNA, 37 nt, synthetic construct
  source 1..37: mol_type = other RNA
attgctccttacgaggagacaaccgtccgggggatgc

SEQ ID NO: 1230 - RNA, 37 nt, synthetic construct
  source 1..37: mol_type = other RNA
attgctccttacgaggagactccctgggcccacagcc

SEQ ID NO: 1231 - RNA, 37 nt, synthetic construct
  source 1..37: mol_type = other RNA
attgctccttacgaggagacaagatgtggctgaaaac

SEQ ID NO: 1232 - RNA, 37 nt, synthetic construct
  source 1..37: mol_type = other RNA
attgctccttacgaggagactcagccacatcttgaag

SEQ ID NO: 1233 - RNA, 37 nt, synthetic construct
  source 1..37: mol_type = other RNA
attgctccttacgaggagaccagccacatcttgaaga

SEQ ID NO: 1234 - RNA, 37 nt, synthetic construct
  source 1..37: mol_type = other RNA
attgctccttacgaggagacagccacatcttgaagag

SEQ ID NO: 1235 - RNA, 37 nt, synthetic construct
  source 1..37: mol_type = other RNA
attgctccttacgaggagacaagagacctgaccgcgt

SEQ ID NO: 1236 - RNA, 37 nt, synthetic construct
  source 1..37: mol_type = other RNA
attgctccttacgaggagactgctcatcctagacggc

SEQ ID NO: 1237 - RNA, 37 nt, synthetic construct
  source 1..37: mol_type = other RNA
attgctccttacgaggagaccagctcctcgaagccgt

SEQ ID NO: 1238 - RNA, 37 nt, synthetic construct
  source 1..37: mol_type = other RNA
attgctccttacgaggagaccgcttccagctcctcga

SEQ ID NO: 1239 - RNA, 37 nt, synthetic construct
  source 1..37: mol_type = other RNA
attgctccttacgaggagacgaggagctggaagcgca

SEQ ID NO: 1240 - RNA, 37 nt, synthetic construct
  source 1..37: mol_type = other RNA
attgctccttacgaggagacctgcacagcacgtgcgg

SEQ ID NO: 1241 - RNA, 37 nt, synthetic construct
  source 1..37: mol_type = other RNA
attgctccttacgaggagactggaaaaggccggccag

SEQ ID NO: 1242 - RNA, 37 nt, synthetic construct
  source 1..37: mol_type = other RNA
attgctccttacgaggagacttctggaaaaggccggc

SEQ ID NO: 1243 - RNA, 37 nt, synthetic construct
  source 1..37: mol_type = other RNA
attgctccttacgaggagactccagaagaagctgctc

SEQ ID NO: 1244 - RNA, 37 nt, synthetic construct
  source 1..37: mol_type = other RNA
attgctccttacgaggagacccagaagaagctgctcc

SEQ ID NO: 1245 - RNA, 37 nt, synthetic construct
  source 1..37: mol_type = other RNA
attgctccttacgaggagaccagaagaagctgctccg

SEQ ID NO: 1246 - RNA, 37 nt, synthetic construct
  source 1..37: mol_type = other RNA
attgctccttacgaggagaccaccctcctcctcacag

SEQ ID NO: 1247 - RNA, 37 nt, synthetic construct
  source 1..37: mol_type = other RNA
attgctccttacgaggagacctcaggctctggaccag

SEQ ID NO: 1248 - RNA, 37 nt, synthetic construct
  source 1..37: mol_type = other RNA
attgctccttacgaggagacgagctgtccggcttctc

SEQ ID NO: 1249 - RNA, 37 nt, synthetic construct
  source 1..37: mol_type = other RNA
attgctccttacgaggagacagctgtccggcttctcc

SEQ ID NO: 1250 - RNA, 37 nt, synthetic construct
  source 1..37: mol_type = other RNA
attgctccttacgaggagactccatggagcaggccca

SEQ ID NO: 1251 - RNA, 37 nt, synthetic construct
  source 1..37: mol_type = other RNA
attgctccttacgaggagacgagagctcagggatgac

SEQ ID NO: 1252 - RNA, 37 nt, synthetic construct
  source 1..37: mol_type = other RNA
attgctccttacgaggagacagagctcagggatgaca

SEQ ID NO: 1253 - RNA, 37 nt, synthetic construct
  source 1..37: mol_type = other RNA
attgctccttacgaggagacgtgctctgtcatccctg

SEQ ID NO: 1254 - RNA, 37 nt, synthetic construct
  source 1..37: mol_type = other RNA
attgctccttacgaggagacttctcagtcacagccac

SEQ ID NO: 1255 - RNA, 37 nt, synthetic construct
  source 1..37: mol_type = other RNA
attgctccttacgaggagactcagtcacagccacagc

SEQ ID NO: 1256 - RNA, 37 nt, synthetic construct
  source 1..37: mol_type = other RNA
attgctccttacgaggagacgtgccgggcagtgtgcc

SEQ ID NO: 1257 - RNA, 37 nt, synthetic construct
  source 1..37: mol_type = other RNA
attgctccttacgaggagactgccgggcagtgtgcca

SEQ ID NO: 1258 - RNA, 37 nt, synthetic construct
  source 1..37: mol_type = other RNA
attgctccttacgaggagacgcgtcctccccaagctc

SEQ ID NO: 1259 - RNA, 37 nt, synthetic construct
  source 1..37: mol_type = other RNA
attgctccttacgaggagacgggaggacgccaagctg

SEQ ID NO: 1260 - RNA, 37 nt, synthetic construct
  source 1..37: mol_type = other RNA
attgctccttacgaggagacgccagctctgccagggc

SEQ ID NO: 1261 - RNA, 37 nt, synthetic construct
  source 1..37: mol_type = other RNA
attgctccttacgaggagacatgtctgcggcccagct

SEQ ID NO: 1262 - RNA, 37 nt, synthetic construct
  source 1..37: mol_type = other RNA
attgctccttacgaggagacgatgtctgcggcccagc

SEQ ID NO: 1263 - RNA, 37 nt, synthetic construct
  source 1..37: mol_type = other RNA
attgctccttacgaggagacccatccgcagacgtgag

SEQ ID NO: 1264 - RNA, 37 nt, synthetic construct
  source 1..37: mol_type = other RNA
attgctccttacgaggagacgccatcgcccaggtcct

SEQ ID NO: 1265 - RNA, 37 nt, synthetic construct
  source 1..37: mol_type = other RNA
attgctccttacgaggagacggccatcgcccaggtcc

SEQ ID NO: 1266 - RNA, 37 nt, synthetic construct
  source 1..37: mol_type = other RNA
attgctccttacgaggagacgactaagcctttggcca

SEQ ID NO: 1267 - RNA, 37 nt, synthetic construct
  source 1..37: mol_type = other RNA
attgctccttacgaggagacgtccaacacccaccgcg

SEQ ID NO: 1268 - RNA, 37 nt, synthetic construct
  source 1..37: mol_type = other RNA
attgctccttacgaggagaccaggaggaagctgggga

SEQ ID NO: 1269 - RNA, 37 nt, synthetic construct
  source 1..37: mol_type = other RNA
attgctccttacgaggagaccccagcttcctcctgca

SEQ ID NO: 1270 - RNA, 37 nt, synthetic construct
  source 1..37: mol_type = other RNA
attgctccttacgaggagacctcctgcaatgcttcct

SEQ ID NO: 1271 - RNA, 37 nt, synthetic construct
  source 1..37: mol_type = other RNA
attgctccttacgaggagacctgggggccctgtggct

SEQ ID NO: 1272 - RNA, 37 nt, synthetic construct
  source 1..37: mol_type = other RNA
attgctccttacgaggagacgccactcagagccagcc

SEQ ID NO: 1273 - RNA, 37 nt, synthetic construct
  source 1..37: mol_type = other RNA
attgctccttacgaggagaccgccactcagagccagc

SEQ ID NO: 1274 - RNA, 37 nt, synthetic construct
  source 1..37: mol_type = other RNA
attgctccttacgaggagacatttcgccactcagagc

SEQ ID NO: 1275 - RNA, 37 nt, synthetic construct
  source 1..37: mol_type = other RNA
attgctccttacgaggagactccttgatttcgccact

SEQ ID NO: 1276 - RNA, 37 nt, synthetic construct
  source 1..37: mol_type = other RNA
attgctccttacgaggagacgggtcaatgctaggtac

SEQ ID NO: 1277 - RNA, 37 nt, synthetic construct
  source 1..37: mol_type = other RNA
attgctccttacgaggagaccttggggtcaatgctag

SEQ ID NO: 1278 - RNA, 37 nt, synthetic construct
  source 1..37: mol_type = other RNA
attgctccttacgaggagacttccttggggtcaatgc

SEQ ID NO: 1279 - RNA, 37 nt, synthetic construct
  source 1..37: mol_type = other RNA
attgctccttacgaggagacaccccaaggaagaagag

SEQ ID NO: 1280 - RNA, 37 nt, synthetic construct
  source 1..37: mol_type = other RNA
attgctccttacgaggagactcatagggcctcttctt

SEQ ID NO: 1281 - RNA, 37 nt, synthetic construct
  source 1..37: mol_type = other RNA
attgctccttacgaggagacctggctgggctgatctt

SEQ ID NO: 1282 - RNA, 37 nt, synthetic construct
  source 1..37: mol_type = other RNA
attgctccttacgaggagactggctgggctgatcttc

SEQ ID NO: 1283 - RNA, 37 nt, synthetic construct
  source 1..37: mol_type = other RNA
attgctccttacgaggagaccagcctcccgcccgctg

SEQ ID NO: 1284 - RNA, 37 nt, synthetic construct
  source 1..37: mol_type = other RNA
attgctccttacgaggagacctgtccaccgaggcagc

SEQ ID NO: 1285 - RNA, 37 nt, synthetic construct
  source 1..37: mol_type = other RNA
attgctccttacgaggagactgcttcctgtccaccga

SEQ ID NO: 1286 - RNA, 37 nt, synthetic construct
  source 1..37: mol_type = other RNA
attgctccttacgaggagacaggtacctcgcaagcac

SEQ ID NO: 1287 - RNA, 37 nt, synthetic construct
  source 1..37: mol_type = other RNA
attgctccttacgaggagaccgaggtacctgaagcgg

SEQ ID NO: 1288 - RNA, 37 nt, synthetic construct
  source 1..37: mol_type = other RNA
attgctccttacgaggagaccagcctcctcggcctcg

SEQ ID NO: 1289 - RNA, 37 nt, synthetic construct
  source 1..37: mol_type = other RNA
attgctccttacgaggagacggcagcacgtggtacag

SEQ ID NO: 1290 - RNA, 37 nt, synthetic construct
  source 1..37: mol_type = other RNA
attgctccttacgaggagacgcagcacgtggtacagg

SEQ ID NO: 1291 - RNA, 37 nt, synthetic construct
  source 1..37: mol_type = other RNA
attgctccttacgaggagactctgggcacccgcctca

SEQ ID NO: 1292 - RNA, 37 nt, synthetic construct
  source 1..37: mol_type = other RNA
attgctccttacgaggagacctgggcacccgcctcac

SEQ ID NO: 1293 - RNA, 37 nt, synthetic construct
  source 1..37: mol_type = other RNA
attgctccttacgaggagactgggcacccgcctcacg

SEQ ID NO: 1294 - RNA, 37 nt, synthetic construct
  source 1..37: mol_type = other RNA
attgctccttacgaggagaccccagtacatgtgcatc

SEQ ID NO: 1295 - RNA, 37 nt, synthetic construct
  source 1..37: mol_type = other RNA
attgctccttacgaggagacgcccgccgcctccaagg

SEQ ID NO: 1296 - RNA, 37 nt, synthetic construct
  source 1..37: mol_type = other RNA
attgctccttacgaggagacgaggcggcgggccaaga

SEQ ID NO: 1297 - RNA, 37 nt, synthetic construct
  source 1..37: mol_type = other RNA
attgctccttacgaggagactccctggacctccgcag

SEQ ID NO: 1298 - RNA, 37 nt, synthetic construct
  source 1..37: mol_type = other RNA
attgctccttacgaggagacgcccctctggattgggg

SEQ ID NO: 1299 - RNA, 37 nt, synthetic construct
  source 1..37: mol_type = other RNA
attgctccttacgaggagaccccctctggattgggga

SEQ ID NO: 1300 - RNA, 37 nt, synthetic construct
  source 1..37: mol_type = other RNA
attgctccttacgaggagacgggagcctcgtgggact

SEQ ID NO: 1301 - RNA, 37 nt, synthetic construct
  source 1..37: mol_type = other RNA
attgctccttacgaggagacgtctccccatgctgctg

SEQ ID NO: 1302 - RNA, 37 nt, synthetic construct
  source 1..37: mol_type = other RNA
attgctccttacgaggagactcctctgctgcctgaag

SEQ ID NO: 1303 - RNA, 37 nt, synthetic construct
  source 1..37: mol_type = other RNA
attgctccttacgaggagacaggcagcagaggagaag

SEQ ID NO: 1304 - RNA, 37 nt, synthetic construct
  source 1..37: mol_type = other RNA
attgctccttacgaggagacaaaggctcgatggtgaa

SEQ ID NO: 1305 - RNA, 37 nt, synthetic construct
  source 1..37: mol_type = other RNA
attgctccttacgaggagacgaaaggctcgatggtga

SEQ ID NO: 1306 - RNA, 37 nt, synthetic construct
  source 1..37: mol_type = other RNA
attgctccttacgaggagacaccatcgagcctttcaa

SEQ ID NO: 1307 - RNA, 37 nt, synthetic construct
  source 1..37: mol_type = other RNA
attgctccttacgaggagacgctttgaaaggctcgat

SEQ ID NO: 1308 - RNA, 37 nt, synthetic construct
  source 1..37: mol_type = other RNA
attgctccttacgaggagacagggacttggctttgaa

SEQ ID NO: 1309 - RNA, 37 nt, synthetic construct
  source 1..37: mol_type = other RNA
attgctccttacgaggagaccaaagccaagtccctga

SEQ ID NO: 1310 - RNA, 37 nt, synthetic construct
  source 1..37: mol_type = other RNA
attgctccttacgaggagacaaagccaagtccctgaa

SEQ ID NO: 1311 - RNA, 37 nt, synthetic construct
  source 1..37: mol_type = other RNA
attgctccttacgaggagaccacatccttcagggact

SEQ ID NO: 1312 - RNA, 37 nt, synthetic construct
  source 1..37: mol_type = other RNA
attgctccttacgaggagacccaggtcttccacatcc

SEQ ID NO: 1313 - RNA, 37 nt, synthetic construct
  source 1..37: mol_type = other RNA
attgctccttacgaggagaccccaggtcttccacatc

SEQ ID NO: 1314 - RNA, 37 nt, synthetic construct
  source 1..37: mol_type = other RNA
attgctccttacgaggagacctcggaagacacagctg

SEQ ID NO: 1315 - RNA, 37 nt, synthetic construct
  source 1..37: mol_type = other RNA
attgctccttacgaggagacggtcccgaacagcaggg

SEQ ID NO: 1316 - RNA, 37 nt, synthetic construct
  source 1..37: mol_type = other RNA
attgctccttacgaggagacaggtcccgaacagcagg

SEQ ID NO: 1317 - RNA, 37 nt, synthetic construct
  source 1..37: mol_type = other RNA
attgctccttacgaggagactttaggtcccgaacagc

SEQ ID NO: 1318 - RNA, 37 nt, synthetic construct
  source 1..37: mol_type = other RNA
attgctccttacgaggagacctttaggtcccgaacag

SEQ ID NO: 1319 - RNA, 37 nt, synthetic construct
  source 1..37: mol_type = other RNA
attgctccttacgaggagacgggacctaaagaaactg

SEQ ID NO: 1320 - RNA, 37 nt, synthetic construct
  source 1..37: mol_type = other RNA
attgctccttacgaggagacgggaaagcctgggggcc

SEQ ID NO: 1321 - RNA, 37 nt, synthetic construct
  source 1..37: mol_type = other RNA
attgctccttacgaggagacggggaaagcctgggggc

SEQ ID NO: 1322 - RNA, 37 nt, synthetic construct
  source 1..37: mol_type = other RNA
attgctccttacgaggagacccccaaactggtgcgga

SEQ ID NO: 1323 - RNA, 37 nt, synthetic construct
  source 1..37: mol_type = other RNA
attgctccttacgaggagaccccaaactggtgcggat

SEQ ID NO: 1324 - RNA, 37 nt, synthetic construct
  source 1..37: mol_type = other RNA
attgctccttacgaggagacttctcactcagcgcatc

SEQ ID NO: 1325 - RNA, 37 nt, synthetic construct
  source 1..37: mol_type = other RNA
attgctccttacgaggagacagctgggggaaggtggc

SEQ ID NO: 1326 - RNA, 37 nt, synthetic construct
  source 1..37: mol_type = other RNA
attgctccttacgaggagacccccagctgaagtcctt

SEQ ID NO: 1327 - RNA, 37 nt, synthetic construct
  source 1..37: mol_type = other RNA
attgctccttacgaggagaccaaggacttcagctggg

SEQ ID NO: 1328 - RNA, 37 nt, synthetic construct
  source 1..37: mol_type = other RNA
attgctccttacgaggagacccaaggacttcagctgg

SEQ ID NO: 1329 - RNA, 37 nt, synthetic construct
  source 1..37: mol_type = other RNA
attgctccttacgaggagacagggtttccaaggactt

SEQ ID NO: 1330 - RNA, 37 nt, synthetic construct
  source 1..37: mol_type = other RNA
attgctccttacgaggagactaggcacccaggtcagt

SEQ ID NO: 1331 - RNA, 37 nt, synthetic construct
  source 1..37: mol_type = other RNA
attgctccttacgaggagacgtaggcacccaggtcag

SEQ ID NO: 1332 - RNA, 37 nt, synthetic construct
  source 1..37: mol_type = other RNA
attgctccttacgaggagacgctcgctgcatccctgc

SEQ ID NO: 1333 - RNA, 37 nt, synthetic construct
  source 1..37: mol_type = other RNA
attgctccttacgaggagacgcctgagcagggatgca

SEQ ID NO: 1334 - RNA, 37 nt, synthetic construct
  source 1..37: mol_type = other RNA
attgctccttacgaggagactacaataactgcatctg

SEQ ID NO: 1335 - RNA, 37 nt, synthetic construct
  source 1..37: mol_type = other RNA
attgctccttacgaggagacgctcgtgtgcttccgga

SEQ ID NO: 1336 - RNA, 37 nt, synthetic construct
  source 1..37: mol_type = other RNA
attgctccttacgaggagaccggacatggtgtccctc

SEQ ID NO: 1337 - RNA, 37 nt, synthetic construct
  source 1..37: mol_type = other RNA
attgctccttacgaggagacacggctgccggggccca

SEQ ID NO: 1338 - RNA, 37 nt, synthetic construct
  source 1..37: mol_type = other RNA
attgctccttacgaggagacggaggtgtcctcatgtg

SEQ ID NO: 1339 - RNA, 37 nt, synthetic construct
  source 1..37: mol_type = other RNA
attgctccttacgaggagacctggacactgaatggga

SEQ ID NO: 1340 - RNA, 37 nt, synthetic construct
  source 1..37: mol_type = other RNA
attgctccttacgaggagacagtgtccaggaacacct

SEQ ID NO: 1341 - RNA, 37 nt, synthetic construct
  source 1..37: mol_type = other RNA
attgctccttacgaggagaccaggtgttcctggacac

SEQ ID NO: 1342 - RNA, 37 nt, synthetic construct
  source 1..37: mol_type = other RNA
attgctccttacgaggagacttgcaggtgttcctgga

SEQ ID NO: 1343 - RNA, 37 nt, synthetic construct
  source 1..37: mol_type = other RNA
attgctccttacgaggagacacggatcagcctgagat

SEQ ID NO: 1344 - DNA, 98 bp, synthetic construct
  source 1..98: mol_type = other DNA
tggggcagttggttgcccttagcctgaggcatttattgcactcgggaagtaccatttctcagaaatggtacatccaactctaggcgcccgctaagttc

SEQ ID NO: 1345 - DNA, 98 bp, synthetic construct
  source 1..98: mol_type = other DNA
tggggcagttggttgcccttagcctgaggcatttattgcactcgggaagtaccatttctcagaaatggtacatccaaccccgggtaagcctgtctgct

SEQ ID NO: 1346 - DNA, 98 bp, synthetic construct
  source 1..98: mol_type = other DNA
tggggcagttggttgcccttagcctgaggcatttattgcactcgggaagtaccatttctcagaaatggtacatccaaccgtgctgtttcctccccacg

SEQ ID NO: 1347 - DNA, 98 bp, synthetic construct
  source 1..98: mol_type = other DNA
tggggcagttggttgcccttagcctgaggcatttattgcactcgggaagtaccatttctcagaaatggtacatccaacgtgccttagtttcttcatct

SEQ ID NO: 1348 - DNA, 98 bp, synthetic construct
  source 1..98: mol_type = other DNA
tggggcagttggttgcccttagcctgaggcatttattgcactcgggaagtaccatttctcagaaatggtacatccaacgggggcgggggggagaaaaa

SEQ ID NO: 1349 - DNA, 98 bp, synthetic construct
  source 1..98: mol_type = other DNA
tggggcagttggttgcccttagcctgaggcatttattgcactcgggaagtaccatttctcagaaatggtacatccaacgcgccctccgatctggggtg

SEQ ID NO: 1350 - RNA, 20 nt, synthetic construct
  source 1..20: mol_type = other RNA
attgctccttacgaggagac

SEQ ID NO: 1351 - RNA, 20 nt, synthetic construct
  source 1..20: mol_type = other RNA
cagtgggggtgaattcagtg

SEQ ID NO: 1352 - RNA, 40 nt, synthetic construct
  source 1..40: mol_type = other RNA
attgctccttacgaggagaccagtgggggtgaattcagtg

SEQ ID NO: 1353 - RNA, 20 nt, synthetic construct
  source 1..20: mol_type = other RNA
gagtctctcagctggtacac

SEQ ID NO: 1354 - RNA, 40 nt, synthetic construct
  source 1..40: mol_type = other RNA
attgctccttacgaggagacgagtctctcagctggtacac

SEQ ID NO: 1355 - RNA, 17 nt, synthetic construct
  source 1..17: mol_type = other RNA
cagtgggggtgaattca

SEQ ID NO: 1356 - RNA, 37 nt, synthetic construct
  source 1..37: mol_type = other RNA
attgctccttacgaggagaccagtgggggtgaattca

SEQ ID NO: 1357 - RNA, 37 nt, synthetic construct
  source 1..37: mol_type = other RNA
attgctccttacgaggagacgagtctctcagctggta

SEQ ID NO: 1358 - RNA, 20 nt, synthetic construct
  source 1..20: mol_type = other RNA
tcccacagatatccagaacc

SEQ ID NO: 1359 - RNA, 20 nt, synthetic construct
  source 1..20: mol_type = other RNA
agagtctctcagctggtaca

SEQ ID NO: 1360 - RNA, 20 nt, synthetic construct
  source 1..20: mol_type = other RNA
aagtccatagacctcatgtc

SEQ ID NO: 1361 - RNA, 20 nt, synthetic construct
  source 1..20: mol_type = other RNA
aagagcaacagtgctgtggc

SEQ ID NO: 1362 - RNA, 20 nt, synthetic construct
  source 1..20: mol_type = other RNA
gttgctccaggccacagcac

SEQ ID NO: 1363 - RNA, 20 nt, synthetic construct
  source 1..20: mol_type = other RNA
gcacatgcaaagtcagattt

SEQ ID NO: 1364 - RNA, 20 nt, synthetic construct
  source 1..20: mol_type = other RNA
gcatgtgcaaacgccttcaa

SEQ ID NO: 1365 - RNA, 20 nt, synthetic construct
  source 1..20: mol_type = other RNA
ctaaaaggaaaaacagacat

SEQ ID NO: 1366 - RNA, 20 nt, synthetic construct
  source 1..20: mol_type = other RNA
ctcgaccagcttgacatcac

SEQ ID NO: 1367 - RNA, 20 nt, synthetic construct
  source 1..20: mol_type = other RNA
atataagtggaggcgtcgcg

SEQ ID NO: 1368 - RNA, 20 nt, synthetic construct
  source 1..20: mol_type = other RNA
gggccgagatgtctcgctcc

SEQ ID NO: 1369 - RNA, 20 nt, synthetic construct
  source 1..20: mol_type = other RNA
tggcctggaggctatccagc

SEQ ID NO: 1370 - RNA, 20 nt, synthetic construct
  source 1..20: mol_type = other RNA
aagttgacttactgaagaat

SEQ ID NO: 1371 - RNA, 20 nt, synthetic construct
  source 1..20: mol_type = other RNA
agcaaggactggtctttcta

SEQ ID NO: 1372 - RNA, 20 nt, synthetic construct
  source 1..20: mol_type = other RNA
agtgggggtgaattcagtgt

SEQ ID NO: 1373 - RNA, 20 nt, synthetic construct
  source 1..20: mol_type = other RNA
ggctgtgacaaagtcacatg

SEQ ID NO: 1374 - RNA, 20 nt, synthetic construct
  source 1..20: mol_type = other RNA
gtcacagcccaagatagtta

SEQ ID NO: 1375 - RNA, 20 nt, synthetic construct
  source 1..20: mol_type = other RNA
tcacagcccaagatagttaa

SEQ ID NO: 1376 - RNA, 20 nt, synthetic construct
  source 1..20: mol_type = other RNA
tgtgacacggaagcggcagt

SEQ ID NO: 1377 - RNA, 20 nt, synthetic construct
  source 1..20: mol_type = other RNA
ggggctggttggagatggcc

SEQ ID NO: 1378 - RNA, 20 nt, synthetic construct
  source 1..20: mol_type = other RNA
gagcagccaaggtgcccctg

SEQ ID NO: 1379 - RNA, 20 nt, synthetic construct
  source 1..20: mol_type = other RNA
acacatgcccaggcagcacc

SEQ ID NO: 1380 - RNA, 20 nt, synthetic construct
  source 1..20: mol_type = other RNA
aggcccagccagcactctgg

SEQ ID NO: 1381 - RNA, 56 nt, synthetic construct
  source 1..56: mol_type = other RNA
ctttcaagactaatagattgctccttacgaggagacagcaaggactggtctttcta

SEQ ID NO: 1382 - RNA, 56 nt, synthetic construct
  source 1..56: mol_type = other RNA
ctttcaagactaatagattgctccttacgaggagacgagtctctcagctggtacac

SEQ ID NO: 1383 - RNA, 56 nt, synthetic construct
  source 1..56: mol_type = other RNA
ctttcaagactaatagattgctccttacgaggagactagcaccgcccagacgactg

SEQ ID NO: 1384 - RNA, 20 nt, synthetic construct
  source 1..20: mol_type = other RNA
ccgctgttgccgccgctgct

SEQ ID NO: 1385 - RNA, 20 nt, synthetic construct
  source 1..20: mol_type = other RNA
ccgccgctgctgctgctgtt

SEQ ID NO: 1386 - RNA, 20 nt, synthetic construct
  source 1..20: mol_type = other RNA
ctgctactgtgccccaccgg

SEQ ID NO: 1387 - RNA, 20 nt, synthetic construct
  source 1..20: mol_type = other RNA
ataatctccatcctcgtcct

SEQ ID NO: 1388 - RNA, 20 nt, synthetic construct
  source 1..20: mol_type = other RNA
tgaagagctgatgctcgccc

SEQ ID NO: 1389 - RNA, 20 nt, synthetic construct
  source 1..20: mol_type = other RNA
gagcaacggcggaaggtggc

SEQ ID NO: 1390 - RNA, 20 nt, synthetic construct
  source 1..20: mol_type = other RNA
ctggcagcctccaggcctcc

SEQ ID NO: 1391 - RNA, 20 nt, synthetic construct
  source 1..20: mol_type = other RNA
tggtgctgatggaggagacc

SEQ ID NO: 1392 - RNA, 20 nt, synthetic construct
  source 1..20: mol_type = other RNA
aatctgtagcctctgggtct

SEQ ID NO: 1393 - RNA, 20 nt, synthetic construct
  source 1..20: mol_type = other RNA
ttcaatctgtagcctctggg

SEQ ID NO: 1394 - RNA, 20 nt, synthetic construct
  source 1..20: mol_type = other RNA
gttcaatctgtagcctctgg

SEQ ID NO: 1395 - RNA, 20 nt, synthetic construct
  source 1..20: mol_type = other RNA
aacaaactgcccaccgcctg

SEQ ID NO: 1396 - RNA, 20 nt, synthetic construct
  source 1..20: mol_type = other RNA
atgacatagccccggcgggc

SEQ ID NO: 1397 - RNA, 20 nt, synthetic construct
  source 1..20: mol_type = other RNA
tacatatcttttatgacctc

SEQ ID NO: 1398 - RNA, 20 nt, synthetic construct
  source 1..20: mol_type = other RNA
tatgacctcttccctggctt

SEQ ID NO: 1399 - RNA, 20 nt, synthetic construct
  source 1..20: mol_type = other RNA
atgacctcttccctggcttc

SEQ ID NO: 1400 - RNA, 20 nt, synthetic construct
  source 1..20: mol_type = other RNA
tgacctcttccctggcttct

SEQ ID NO: 1401 - RNA, 20 nt, synthetic construct
  source 1..20: mol_type = other RNA
accaagaagccagggaagag

SEQ ID NO: 1402 - RNA, 20 nt, synthetic construct
  source 1..20: mol_type = other RNA
cctggcttcttggtgaagat

SEQ ID NO: 1403 - RNA, 20 nt, synthetic construct
  source 1..20: mol_type = other RNA
ttggtgaagatgagcagtga

SEQ ID NO: 1404 - RNA, 20 nt, synthetic construct
  source 1..20: mol_type = other RNA
gtgaagatgagcagtgacct

SEQ ID NO: 1405 - RNA, 20 nt, synthetic construct
  source 1..20: mol_type = other RNA
ccccatgtggagtacattga

SEQ ID NO: 1406 - RNA, 20 nt, synthetic construct
  source 1..20: mol_type = other RNA
ctcaatgtactccacatggg

SEQ ID NO: 1407 - RNA, 20 nt, synthetic construct
  source 1..20: mol_type = other RNA
aggaagactcctttgtcttc

SEQ ID NO: 1408 - RNA, 20 nt, synthetic construct
  source 1..20: mol_type = other RNA
gtcttcgcccagagcatccc

SEQ ID NO: 1409 - RNA, 20 nt, synthetic construct
  source 1..20: mol_type = other RNA
tcttcgcccagagcatccca

SEQ ID NO: 1410 - RNA, 20 nt, synthetic construct
  source 1..20: mol_type = other RNA
gcccagagcatcccatggaa

SEQ ID NO: 1411 - RNA, 20 nt, synthetic construct
  source 1..20: mol_type = other RNA
catgggatgctctgggcgaa

SEQ ID NO: 1412 - RNA, 20 nt, synthetic construct
  source 1..20: mol_type = other RNA
gctccaggttccatgggatg

SEQ ID NO: 1413 - RNA, 20 nt, synthetic construct
  source 1..20: mol_type = other RNA
tcccagcatggcaccagaca

SEQ ID NO: 1414 - RNA, 20 nt, synthetic construct
  source 1..20: mol_type = other RNA
ctctgtctggtgccatgctg

SEQ ID NO: 1415 - RNA, 20 nt, synthetic construct
  source 1..20: mol_type = other RNA
gataccagcatccagggtgc

SEQ ID NO: 1416 - RNA, 20 nt, synthetic construct
  source 1..20: mol_type = other RNA
agggcagggtcaccatcacc

SEQ ID NO: 1417 - RNA, 20 nt, synthetic construct
  source 1..20: mol_type = other RNA
aagtcggtgatggtgaccct

SEQ ID NO: 1418 - RNA, 20 nt, synthetic construct
  source 1..20: mol_type = other RNA
aacagcgtgccggaggagga

SEQ ID NO: 1419 - RNA, 20 nt, synthetic construct
  source 1..20: mol_type = other RNA
gccacaccagcatcccggcc

SEQ ID NO: 1420 - RNA, 20 nt, synthetic construct
  source 1..20: mol_type = other RNA
agcacacgcaggctgtgcag

SEQ ID NO: 1421 - RNA, 20 nt, synthetic construct
  source 1..20: mol_type = other RNA
acagttgagcacacgcaggc

SEQ ID NO: 1422 - RNA, 20 nt, synthetic construct
  source 1..20: mol_type = other RNA
ccttgacagttgagcacacg

SEQ ID NO: 1423 - RNA, 20 nt, synthetic construct
  source 1..20: mol_type = other RNA
gctgactcttccgaataaac

SEQ ID NO: 1424 - RNA, 20 nt, synthetic construct
  source 1..20: mol_type = other RNA
attcggaagagtcagctaat

SEQ ID NO: 1425 - RNA, 20 nt, synthetic construct
  source 1..20: mol_type = other RNA
ttcggaagagtcagctaatc

SEQ ID NO: 1426 - RNA, 20 nt, synthetic construct
  source 1..20: mol_type = other RNA
ggaagagtcagctaatccag

SEQ ID NO: 1427 - RNA, 20 nt, synthetic construct
  source 1..20: mol_type = other RNA
tgctgcccctggccggtggg

SEQ ID NO: 1428 - RNA, 20 nt, synthetic construct
  source 1..20: mol_type = other RNA
aggatgcggctatacccacc

SEQ ID NO: 1429 - RNA, 20 nt, synthetic construct
  source 1..20: mol_type = other RNA
ccagctgctgcaaccagcac

SEQ ID NO: 1430 - RNA, 20 nt, synthetic construct
  source 1..20: mol_type = other RNA
cagcagctgggaacttccgg

SEQ ID NO: 1431 - RNA, 20 nt, synthetic construct
  source 1..20: mol_type = other RNA
cgggacgacgcctgcctcta

SEQ ID NO: 1432 - RNA, 20 nt, synthetic construct
  source 1..20: mol_type = other RNA
gtggccccgactgtgatgac

SEQ ID NO: 1433 - RNA, 20 nt, synthetic construct
  source 1..20: mol_type = other RNA
ccttggggactttggggact

SEQ ID NO: 1434 - RNA, 20 nt, synthetic construct
  source 1..20: mol_type = other RNA
gtccccaaagtccccaaggt

SEQ ID NO: 1435 - RNA, 20 nt, synthetic construct
  source 1..20: mol_type = other RNA
gggactttggggactaattt

SEQ ID NO: 1436 - RNA, 20 nt, synthetic construct
  source 1..20: mol_type = other RNA
ggggactaattttggacgct

SEQ ID NO: 1437 - RNA, 20 nt, synthetic construct
  source 1..20: mol_type = other RNA
gggactaattttggacgctg

SEQ ID NO: 1438 - RNA, 20 nt, synthetic construct
  source 1..20: mol_type = other RNA
tggacgctgtgtggatctct

SEQ ID NO: 1439 - RNA, 20 nt, synthetic construct
  source 1..20: mol_type = other RNA
ggacgctgtgtggatctctt

SEQ ID NO: 1440 - RNA, 20 nt, synthetic construct
  source 1..20: mol_type = other RNA
gacgctgtgtggatctcttt

SEQ ID NO: 1441 - RNA, 20 nt, synthetic construct
  source 1..20: mol_type = other RNA
ccgggggcaaagagatccac

SEQ ID NO: 1442 - RNA, 20 nt, synthetic construct
  source 1..20: mol_type = other RNA
gcccccgggaaggacatcat

SEQ ID NO: 1443 - RNA, 20 nt, synthetic construct
  source 1..20: mol_type = other RNA
cccccgggaaggacatcatc

SEQ ID NO: 1444 - RNA, 20 nt, synthetic construct
  source 1..20: mol_type = other RNA
atgtcacagagtgggacctc

SEQ ID NO: 1445 - RNA, 20 nt, synthetic construct
  source 1..20: mol_type = other RNA
tggctcggatgctgagccgg

SEQ ID NO: 1446 - RNA, 20 nt, synthetic construct
  source 1..20: mol_type = other RNA
ccctggccgagctgcggcag

SEQ ID NO: 1447 - RNA, 20 nt, synthetic construct
  source 1..20: mol_type = other RNA
gtagagaagtggatcagcct

SEQ ID NO: 1448 - RNA, 20 nt, synthetic construct
  source 1..20: mol_type = other RNA
ggtagagaagtggatcagcc

SEQ ID NO: 1449 - RNA, 20 nt, synthetic construct
  source 1..20: mol_type = other RNA
tctaccaaagacgtcatcaa

SEQ ID NO: 1450 - RNA, 20 nt, synthetic construct
  source 1..20: mol_type = other RNA
atgacgtctttggtagagaa

SEQ ID NO: 1451 - RNA, 20 nt, synthetic construct
  source 1..20: mol_type = other RNA
cctgaggaccagcaggtgct

SEQ ID NO: 1452 - RNA, 20 nt, synthetic construct
  source 1..20: mol_type = other RNA
ggggtcagcacctgctggtc

SEQ ID NO: 1453 - RNA, 20 nt, synthetic construct
  source 1..20: mol_type = other RNA
gagtgggccccgagtgtgcc

SEQ ID NO: 1454 - RNA, 20 nt, synthetic construct
  source 1..20: mol_type = other RNA
tggggcacagcgggctgtag

SEQ ID NO: 1455 - RNA, 20 nt, synthetic construct
  source 1..20: mol_type = other RNA
tccaggagcgggaggcgtcg

SEQ ID NO: 1456 - RNA, 20 nt, synthetic construct
  source 1..20: mol_type = other RNA
cagacctgctggcctcctat

SEQ ID NO: 1457 - RNA, 20 nt, synthetic construct
  source 1..20: mol_type = other RNA
agggccttgcagacctgctg

SEQ ID NO: 1458 - RNA, 20 nt, synthetic construct
  source 1..20: mol_type = other RNA
gggggtgagggtgtctatgc

SEQ ID NO: 1459 - RNA, 20 nt, synthetic construct
  source 1..20: mol_type = other RNA
ggggtgagggtgtctatgcc

SEQ ID NO: 1460 - RNA, 20 nt, synthetic construct
  source 1..20: mol_type = other RNA
gcacggggaaccaggcagca

SEQ ID NO: 1461 - RNA, 20 nt, synthetic construct
  source 1..20: mol_type = other RNA
cccgtgccaactgcagcatc

SEQ ID NO: 1462 - RNA, 20 nt, synthetic construct
  source 1..20: mol_type = other RNA
tggatgctgcagttggcacg

SEQ ID NO: 1463 - RNA, 20 nt, synthetic construct
  source 1..20: mol_type = other RNA
tggtggcagtggacatgggt

SEQ ID NO: 1464 - RNA, 20 nt, synthetic construct
  source 1..20: mol_type = other RNA
cacttcccaatggaagctgc

SEQ ID NO: 1465 - RNA, 20 nt, synthetic construct
  source 1..20: mol_type = other RNA
cattgggaagtggaagacct

SEQ ID NO: 1466 - RNA, 20 nt, synthetic construct
  source 1..20: mol_type = other RNA
ggaagtggaagaccttagtg

SEQ ID NO: 1467 - RNA, 20 nt, synthetic construct
  source 1..20: mol_type = other RNA
gtgtccggaggcagcctgcg

SEQ ID NO: 1468 - RNA, 20 nt, synthetic construct
  source 1..20: mol_type = other RNA
gccaccaggcggccagtgtc

SEQ ID NO: 1469 - RNA, 20 nt, synthetic construct
  source 1..20: mol_type = other RNA
ctgctgccatgccccagggc

SEQ ID NO: 1470 - RNA, 20 nt, synthetic construct
  source 1..20: mol_type = other RNA
cagccctggggcatggcagc

SEQ ID NO: 1471 - RNA, 20 nt, synthetic construct
  source 1..20: mol_type = other RNA
cattccagccctggggcatg

SEQ ID NO: 1472 - RNA, 20 nt, synthetic construct
  source 1..20: mol_type = other RNA
gcattccagccctggggcat

SEQ ID NO: 1473 - RNA, 20 nt, synthetic construct
  source 1..20: mol_type = other RNA
tgcattccagccctggggca

SEQ ID NO: 1474 - RNA, 20 nt, synthetic construct
  source 1..20: mol_type = other RNA
attttgcattccagccctgg

SEQ ID NO: 1475 - RNA, 20 nt, synthetic construct
  source 1..20: mol_type = other RNA
catccagtcagggtccatcc

SEQ ID NO: 1476 - RNA, 20 nt, synthetic construct
  source 1..20: mol_type = other RNA
tccacgctgtaggctcccag

SEQ ID NO: 1477 - RNA, 20 nt, synthetic construct
  source 1..20: mol_type = other RNA
ccacacacaggttgtccacg

SEQ ID NO: 1478 - RNA, 20 nt, synthetic construct
  source 1..20: mol_type = other RNA
tccactggtcctgtctgctc

SEQ ID NO: 1479 - RNA, 20 nt, synthetic construct
  source 1..20: mol_type = other RNA
ctgaaggccggctccggcag

SEQ ID NO: 1480 - RNA, 56 nt, synthetic construct
  source 1..56: mol_type = other RNA
ctttcaagactaatagattgctccttacgaggagacccgctgttgccgccgctgct

SEQ ID NO: 1481 - RNA, 56 nt, synthetic construct
  source 1..56: mol_type = other RNA
ctttcaagactaatagattgctccttacgaggagacccgccgctgctgctgctgtt

SEQ ID NO: 1482 - RNA, 56 nt, synthetic construct
  source 1..56: mol_type = other RNA
ctttcaagactaatagattgctccttacgaggagacctgctactgtgccccaccgg

SEQ ID NO: 1483 - RNA, 56 nt, synthetic construct
  source 1..56: mol_type = other RNA
ctttcaagactaatagattgctccttacgaggagacataatctccatcctcgtcct

SEQ ID NO: 1484 - RNA, 56 nt, synthetic construct
  source 1..56: mol_type = other RNA
ctttcaagactaatagattgctccttacgaggagactgaagagctgatgctcgccc

SEQ ID NO: 1485 - RNA, 56 nt, synthetic construct
  source 1..56: mol_type = other RNA
ctttcaagactaatagattgctccttacgaggagacgagcaacggcggaaggtggc

SEQ ID NO: 1486 - RNA, 56 nt, synthetic construct
  source 1..56: mol_type = other RNA
ctttcaagactaatagattgctccttacgaggagacctggcagcctccaggcctcc

SEQ ID NO: 1487 - RNA, 56 nt, synthetic construct
  source 1..56: mol_type = other RNA
ctttcaagactaatagattgctccttacgaggagactggtgctgatggaggagacc

SEQ ID NO: 1488 - RNA, 56 nt, synthetic construct
  source 1..56: mol_type = other RNA
ctttcaagactaatagattgctccttacgaggagacaatctgtagcctctgggtct

SEQ ID NO: 1489 - RNA, 56 nt, synthetic construct
  source 1..56: mol_type = other RNA
ctttcaagactaatagattgctccttacgaggagacttcaatctgtagcctctggg

SEQ ID NO: 1490 - RNA, 56 nt, synthetic construct
  source 1..56: mol_type = other RNA
ctttcaagactaatagattgctccttacgaggagacgttcaatctgtagcctctgg

SEQ ID NO: 1491 - RNA, 56 nt, synthetic construct
  source 1..56: mol_type = other RNA
ctttcaagactaatagattgctccttacgaggagacaacaaactgcccaccgcctg

SEQ ID NO: 1492 - RNA, 56 nt, synthetic construct
  source 1..56: mol_type = other RNA
ctttcaagactaatagattgctccttacgaggagacatgacatagccccggcgggc

SEQ ID NO: 1493 - RNA, 56 nt, synthetic construct
  source 1..56: mol_type = other RNA
ctttcaagactaatagattgctccttacgaggagactacatatcttttatgacctc

SEQ ID NO: 1494 - RNA, 56 nt, synthetic construct
  source 1..56: mol_type = other RNA
ctttcaagactaatagattgctccttacgaggagactatgacctcttccctggctt

SEQ ID NO: 1495 - RNA, 56 nt, synthetic construct
  source 1..56: mol_type = other RNA
ctttcaagactaatagattgctccttacgaggagacatgacctcttccctggcttc

SEQ ID NO: 1496 - RNA, 56 nt, synthetic construct
  source 1..56: mol_type = other RNA
ctttcaagactaatagattgctccttacgaggagactgacctcttccctggcttct

SEQ ID NO: 1497 - RNA, 56 nt, synthetic construct
  source 1..56: mol_type = other RNA
ctttcaagactaatagattgctccttacgaggagacaccaagaagccagggaagag

SEQ ID NO: 1498 - RNA, 56 nt, synthetic construct
  source 1..56: mol_type = other RNA
ctttcaagactaatagattgctccttacgaggagaccctggcttcttggtgaagat

SEQ ID NO: 1499 - RNA, 56 nt, synthetic construct
  source 1..56: mol_type = other RNA
ctttcaagactaatagattgctccttacgaggagacttggtgaagatgagcagtga

SEQ ID NO: 1500 - RNA, 56 nt, synthetic construct
  source 1..56: mol_type = other RNA
ctttcaagactaatagattgctccttacgaggagacgtgaagatgagcagtgacct

SEQ ID NO: 1501 - RNA, 56 nt, synthetic construct
  source 1..56: mol_type = other RNA
ctttcaagactaatagattgctccttacgaggagacccccatgtggagtacattga

SEQ ID NO: 1502 - RNA, 56 nt, synthetic construct
  source 1..56: mol_type = other RNA
ctttcaagactaatagattgctccttacgaggagacctcaatgtactccacatggg

SEQ ID NO: 1503 - RNA, 56 nt, synthetic construct
  source 1..56: mol_type = other RNA
ctttcaagactaatagattgctccttacgaggagacaggaagactcctttgtcttc

SEQ ID NO: 1504 - RNA, 56 nt, synthetic construct
  source 1..56: mol_type = other RNA
ctttcaagactaatagattgctccttacgaggagacgtcttcgcccagagcatccc

SEQ ID NO: 1505 - RNA, 56 nt, synthetic construct
  source 1..56: mol_type = other RNA
ctttcaagactaatagattgctccttacgaggagactcttcgcccagagcatccca

SEQ ID NO: 1506 - RNA, 56 nt, synthetic construct
  source 1..56: mol_type = other RNA
ctttcaagactaatagattgctccttacgaggagacgcccagagcatcccatggaa

SEQ ID NO: 1507 - RNA, 56 nt, synthetic construct
  source 1..56: mol_type = other RNA
ctttcaagactaatagattgctccttacgaggagaccatgggatgctctgggcgaa

SEQ ID NO: 1508 - RNA, 56 nt, synthetic construct
  source 1..56: mol_type = other RNA
ctttcaagactaatagattgctccttacgaggagacgctccaggttccatgggatg

SEQ ID NO: 1509 - RNA, 56 nt, synthetic construct
  source 1..56: mol_type = other RNA
ctttcaagactaatagattgctccttacgaggagactcccagcatggcaccagaca

SEQ ID NO: 1510 - RNA, 56 nt, synthetic construct
  source 1..56: mol_type = other RNA
ctttcaagactaatagattgctccttacgaggagacctctgtctggtgccatgctg

SEQ ID NO: 1511 - RNA, 56 nt, synthetic construct
  source 1..56: mol_type = other RNA
ctttcaagactaatagattgctccttacgaggagacgataccagcatccagggtgc

SEQ ID NO: 1512 - RNA, 56 nt, synthetic construct
  source 1..56: mol_type = other RNA
ctttcaagactaatagattgctccttacgaggagacagggcagggtcaccatcacc

SEQ ID NO: 1513 - RNA, 56 nt, synthetic construct
  source 1..56: mol_type = other RNA
ctttcaagactaatagattgctccttacgaggagacaagtcggtgatggtgaccct

SEQ ID NO: 1514 - RNA, 56 nt, synthetic construct
  source 1..56: mol_type = other RNA
ctttcaagactaatagattgctccttacgaggagacaacagcgtgccggaggagga

SEQ ID NO: 1515 - RNA, 56 nt, synthetic construct
  source 1..56: mol_type = other RNA
ctttcaagactaatagattgctccttacgaggagacgccacaccagcatcccggcc

SEQ ID NO: 1516 - RNA, 56 nt, synthetic construct
  source 1..56: mol_type = other RNA
ctttcaagactaatagattgctccttacgaggagacagcacacgcaggctgtgcag

SEQ ID NO: 1517 - RNA, 56 nt, synthetic construct
  source 1..56: mol_type = other RNA
ctttcaagactaatagattgctccttacgaggagacacagttgagcacacgcaggc

SEQ ID NO: 1518 - RNA, 56 nt, synthetic construct
  source 1..56: mol_type = other RNA
ctttcaagactaatagattgctccttacgaggagacccttgacagttgagcacacg

SEQ ID NO: 1519 - RNA, 56 nt, synthetic construct
  source 1..56: mol_type = other RNA
ctttcaagactaatagattgctccttacgaggagacgctgactcttccgaataaac

SEQ ID NO: 1520 - RNA, 56 nt, synthetic construct
  source 1..56: mol_type = other RNA
ctttcaagactaatagattgctccttacgaggagacattcggaagagtcagctaat

SEQ ID NO: 1521 - RNA, 56 nt, synthetic construct
  source 1..56: mol_type = other RNA
ctttcaagactaatagattgctccttacgaggagacttcggaagagtcagctaatc

SEQ ID NO: 1522 - RNA, 56 nt, synthetic construct
  source 1..56: mol_type = other RNA
ctttcaagactaatagattgctccttacgaggagacggaagagtcagctaatccag

SEQ ID NO: 1523 - RNA, 56 nt, synthetic construct
  source 1..56: mol_type = other RNA
ctttcaagactaatagattgctccttacgaggagactgctgcccctggccggtggg

SEQ ID NO: 1524 - RNA, 56 nt, synthetic construct
  source 1..56: mol_type = other RNA
ctttcaagactaatagattgctccttacgaggagacaggatgcggctatacccacc

SEQ ID NO: 1525 - RNA, 56 nt, synthetic construct
  source 1..56: mol_type = other RNA
ctttcaagactaatagattgctccttacgaggagacccagctgctgcaaccagcac

SEQ ID NO: 1526 - RNA, 56 nt, synthetic construct
  source 1..56: mol_type = other RNA
ctttcaagactaatagattgctccttacgaggagaccagcagctgggaacttccgg

SEQ ID NO: 1527 - RNA, 56 nt, synthetic construct
  source 1..56: mol_type = other RNA
ctttcaagactaatagattgctccttacgaggagaccgggacgacgcctgcctcta

SEQ ID NO: 1528 - RNA, 56 nt, synthetic construct
  source 1..56: mol_type = other RNA
ctttcaagactaatagattgctccttacgaggagacgtggccccgactgtgatgac

SEQ ID NO: 1529 - RNA, 56 nt, synthetic construct
  source 1..56: mol_type = other RNA
ctttcaagactaatagattgctccttacgaggagacccttggggactttggggact

SEQ ID NO: 1530 - RNA, 56 nt, synthetic construct
  source 1..56: mol_type = other RNA
ctttcaagactaatagattgctccttacgaggagacgtccccaaagtccccaaggt

SEQ ID NO: 1531 - RNA, 56 nt, synthetic construct
  source 1..56: mol_type = other RNA
ctttcaagactaatagattgctccttacgaggagacgggactttggggactaattt

SEQ ID NO: 1532 - RNA, 56 nt, synthetic construct
  source 1..56: mol_type = other RNA
ctttcaagactaatagattgctccttacgaggagacggggactaattttggacgct

SEQ ID NO: 1533 - RNA, 56 nt, synthetic construct
  source 1..56: mol_type = other RNA
ctttcaagactaatagattgctccttacgaggagacgggactaattttggacgctg

SEQ ID NO: 1534 - RNA, 56 nt, synthetic construct
  source 1..56: mol_type = other RNA
ctttcaagactaatagattgctccttacgaggagactggacgctgtgtggatctct

SEQ ID NO: 1535 - RNA, 56 nt, synthetic construct
  source 1..56: mol_type = other RNA
ctttcaagactaatagattgctccttacgaggagacggacgctgtgtggatctctt

SEQ ID NO: 1536 - RNA, 56 nt, synthetic construct
  source 1..56: mol_type = other RNA
ctttcaagactaatagattgctccttacgaggagacgacgctgtgtggatctcttt

SEQ ID NO: 1537 - RNA, 56 nt, synthetic construct
  source 1..56: mol_type = other RNA
ctttcaagactaatagattgctccttacgaggagacccgggggcaaagagatccac

SEQ ID NO: 1538 - RNA, 56 nt, synthetic construct
  source 1..56: mol_type = other RNA
ctttcaagactaatagattgctccttacgaggagacgcccccgggaaggacatcat

SEQ ID NO: 1539 - RNA, 56 nt, synthetic construct
  source 1..56: mol_type = other RNA
ctttcaagactaatagattgctccttacgaggagaccccccgggaaggacatcatc

SEQ ID NO: 1540 - RNA, 56 nt, synthetic construct
  source 1..56: mol_type = other RNA
ctttcaagactaatagattgctccttacgaggagacatgtcacagagtgggacctc

SEQ ID NO: 1541 - RNA, 56 nt, synthetic construct
  source 1..56: mol_type = other RNA
ctttcaagactaatagattgctccttacgaggagactggctcggatgctgagccgg

SEQ ID NO: 1542 - RNA, 56 nt, synthetic construct
  source 1..56: mol_type = other RNA
ctttcaagactaatagattgctccttacgaggagacccctggccgagctgcggcag

SEQ ID NO: 1543 - RNA, 56 nt, synthetic construct
  source 1..56: mol_type = other RNA
ctttcaagactaatagattgctccttacgaggagacgtagagaagtggatcagcct

SEQ ID NO: 1544 - RNA, 56 nt, synthetic construct
  source 1..56: mol_type = other RNA
ctttcaagactaatagattgctccttacgaggagacggtagagaagtggatcagcc

SEQ ID NO: 1545 - RNA, 56 nt, synthetic construct
  source 1..56: mol_type = other RNA
ctttcaagactaatagattgctccttacgaggagactctaccaaagacgtcatcaa

SEQ ID NO: 1546 - RNA, 56 nt, synthetic construct
  source 1..56: mol_type = other RNA
ctttcaagactaatagattgctccttacgaggagacatgacgtctttggtagagaa

SEQ ID NO: 1547 - RNA, 56 nt, synthetic construct
  source 1..56: mol_type = other RNA
ctttcaagactaatagattgctccttacgaggagaccctgaggaccagcaggtgct

SEQ ID NO: 1548 - RNA, 56 nt, synthetic construct
  source 1..56: mol_type = other RNA
ctttcaagactaatagattgctccttacgaggagacggggtcagcacctgctggtc

SEQ ID NO: 1549 - RNA, 56 nt, synthetic construct
  source 1..56: mol_type = other RNA
ctttcaagactaatagattgctccttacgaggagacgagtgggccccgagtgtgcc

SEQ ID NO: 1550 - RNA, 56 nt, synthetic construct
  source 1..56: mol_type = other RNA
ctttcaagactaatagattgctccttacgaggagactggggcacagcgggctgtag

SEQ ID NO: 1551 - RNA, 56 nt, synthetic construct
  source 1..56: mol_type = other RNA
ctttcaagactaatagattgctccttacgaggagactccaggagcgggaggcgtcg

SEQ ID NO: 1552 - RNA, 56 nt, synthetic construct
  source 1..56: mol_type = other RNA
ctttcaagactaatagattgctccttacgaggagaccagacctgctggcctcctat

SEQ ID NO: 1553 - RNA, 56 nt, synthetic construct
  source 1..56: mol_type = other RNA
ctttcaagactaatagattgctccttacgaggagacagggccttgcagacctgctg

SEQ ID NO: 1554 - RNA, 56 nt, synthetic construct
  source 1..56: mol_type = other RNA
ctttcaagactaatagattgctccttacgaggagacgggggtgagggtgtctatgc

SEQ ID NO: 1555 - RNA, 56 nt, synthetic construct
  source 1..56: mol_type = other RNA
ctttcaagactaatagattgctccttacgaggagacggggtgagggtgtctatgcc

SEQ ID NO: 1556 - RNA, 56 nt, synthetic construct
  source 1..56: mol_type = other RNA
ctttcaagactaatagattgctccttacgaggagacgcacggggaaccaggcagca

SEQ ID NO: 1557 - RNA, 56 nt, synthetic construct
  source 1..56: mol_type = other RNA
ctttcaagactaatagattgctccttacgaggagaccccgtgccaactgcagcatc

SEQ ID NO: 1558 - RNA, 56 nt, synthetic construct
  source 1..56: mol_type = other RNA
ctttcaagactaatagattgctccttacgaggagactggatgctgcagttggcacg

SEQ ID NO: 1559 - RNA, 56 nt, synthetic construct
  source 1..56: mol_type = other RNA
ctttcaagactaatagattgctccttacgaggagactggtggcagtggacatgggt

SEQ ID NO: 1560 - RNA, 56 nt, synthetic construct
  source 1..56: mol_type = other RNA
ctttcaagactaatagattgctccttacgaggagaccacttcccaatggaagctgc

SEQ ID NO: 1561 - RNA, 56 nt, synthetic construct
  source 1..56: mol_type = other RNA
ctttcaagactaatagattgctccttacgaggagaccattgggaagtggaagacct

SEQ ID NO: 1562 - RNA, 56 nt, synthetic construct
  source 1..56: mol_type = other RNA
ctttcaagactaatagattgctccttacgaggagacggaagtggaagaccttagtg

SEQ ID NO: 1563 - RNA, 56 nt, synthetic construct
  source 1..56: mol_type = other RNA
ctttcaagactaatagattgctccttacgaggagacgtgtccggaggcagcctgcg

SEQ ID NO: 1564 - RNA, 56 nt, synthetic construct
  source 1..56: mol_type = other RNA
ctttcaagactaatagattgctccttacgaggagacgccaccaggcggccagtgtc

SEQ ID NO: 1565 - RNA, 56 nt, synthetic construct
  source 1..56: mol_type = other RNA
ctttcaagactaatagattgctccttacgaggagacctgctgccatgccccagggc

SEQ ID NO: 1566 - RNA, 56 nt, synthetic construct
  source 1..56: mol_type = other RNA
ctttcaagactaatagattgctccttacgaggagaccagccctggggcatggcagc

SEQ ID NO: 1567 - RNA, 56 nt, synthetic construct
  source 1..56: mol_type = other RNA
ctttcaagactaatagattgctccttacgaggagaccattccagccctggggcatg

SEQ ID NO: 1568 - RNA, 56 nt, synthetic construct
  source 1..56: mol_type = other RNA
ctttcaagactaatagattgctccttacgaggagacgcattccagccctggggcat

SEQ ID NO: 1569 - RNA, 56 nt, synthetic construct
  source 1..56: mol_type = other RNA
ctttcaagactaatagattgctccttacgaggagactgcattccagccctggggca

SEQ ID NO: 1570 - RNA, 56 nt, synthetic construct
  source 1..56: mol_type = other RNA
ctttcaagactaatagattgctccttacgaggagacattttgcattccagccctgg

SEQ ID NO: 1571 - RNA, 56 nt, synthetic construct
  source 1..56: mol_type = other RNA
ctttcaagactaatagattgctccttacgaggagaccatccagtcagggtccatcc

SEQ ID NO: 1572 - RNA, 56 nt, synthetic construct
  source 1..56: mol_type = other RNA
ctttcaagactaatagattgctccttacgaggagactccacgctgtaggctcccag

SEQ ID NO: 1573 - RNA, 56 nt, synthetic construct
  source 1..56: mol_type = other RNA
ctttcaagactaatagattgctccttacgaggagacccacacacaggttgtccacg

SEQ ID NO: 1574 - RNA, 56 nt, synthetic construct
  source 1..56: mol_type = other RNA
ctttcaagactaatagattgctccttacgaggagactccactggtcctgtctgctc

SEQ ID NO: 1575 - RNA, 56 nt, synthetic construct
  source 1..56: mol_type = other RNA
ctttcaagactaatagattgctccttacgaggagacctgaaggccggctccggcag

SEQ ID NO: 1576 - protein, 118 aa, Homo sapiens
MSRSVALAVLALLSLSGLEGIQRTPKIQVYSRHPAENGKSNFLNCYVSGFHQSDIEVDLLKNGERIEKVEHSDLSFSKDWSFYLLYYTEFTPTEKDEYACRVNHVTLSQPKIVKWDRD

SEQ ID NO: 1577 - DNA, 943 bp, Homo sapiens
  source 1..943: mol_type = genomic DNA
attcctgaagctgacagcattcgggccgagatgtctcgctccgtggccttagctgtgctcgcgctactctctctttctggcctggaggctatccagcgtactccaaagattcaggtttactcacgtcatccagcagagaatggaaagtcaaatttcctgaattgctatgtgtctgggtttcatccatccgacattgaagttgacttactgaagaatggagagagaattgaaaaagtggagcattcagacttgtctttcagcaaggactggtctttctatctcttgtactacactgaattcacccccactgaaaaagatgagtatgcctgccgtgtgaaccatgtgactttgtcacagcccaagatagttaagtgggatcgagacatgtaagcagcatcatggaggtttgaagatgccgcatttggattggatgaattccaaattctgcttgcttgctttttaatattgatatgcttatacacttacactttatgcacaaaatgtagggttataataatgttaacatggacatgatcttctttataattctactttgagtgctgtctccatgtttgatgtatctgagcaggttgctccacaggtagctctaggagggctggcaacttagaggtggggagcagagaattctcttatccaacatcaacatcttggtcagatttgaactcttcaatctcttgcactcaaagcttgttaagatagttaagcgtgcataagttaacttccaatttacatactctgcttagaatttgggggaaaatttagaaatataattgacaggattattggaaatttgttataatgaatgaaacattttgtcatataagattcatatttacttcttatacatttgataaagtaaggcatggttgtggttaatctggtttatttttgttccacaagttaaataaatcataaaacttga

SEQ ID NO: 1578 - protein, 1130 aa, Homo sapiens
MRCLAPRPAGSYLSEPQGSSQCATMELGPLEGGYLELLNSDADPLCLYHFYDQMDLAGEEEIELYSEPDTDTINCDQFSRLLCDMEGDEETREAYANIAELDQYVFQDSQLEGLSKDIFKHIGPDEVIGESMEMPAEVGQKSQKRPFPEELPADLKHWKPAEPPTVVTGSLLVGPVSDCSTLPCLPLPALFNQEPASGQMRLEKTDQIPMPFSSSSLSCLNLPEGPIQFVPTISTLPHGLWQISEAGTGVSSIFIYHGEVPQASQVPPPSGFTVHGLPTSPDRPGSTSPFAPSATDLPSMPEPALTSRANMTEHKTSPTQCPAAGEVSNKLPKWPEPVEQFYRSLQDTYGAEPAGPDGILVEVDLVQARLERSSSKSLERELATPDWAERQLAQGGLAEVLLAAKEHRRPRETRVIAVLGKAGQGKSYWAGAVSRAWACGRLPQYDFVFSVPCHCLNRPGDAYGLQDLLFSLGPQPLVAADEVFSHILKRPDRVLLILDAFEELEAQDGFLHSTCGPAPAEPCSLRGLLAGLFQKKLLRGCTLLLTARPRGRLVQSLSKADALFELSGFSMEQAQAYVMRYFESSGMTEHQDRALTLLRDRPLLLSHSHSPTLCRAVCQLSEALLELGEDAKLPSTLTGLYVGLLGRAALDSPPGALAELAKLAWELGRRHQSTLQEDQFPSADVRTWAMAKGLVQHPPRAAESELAFPSFLLQCFLGALWLALSGEIKDKELPQYLALTPRKKRPYDNWLEGVPRFLAGLIFQPPARCLGALLGPSAAASVDRKQKVLARYLKRLQPGTLRARQLLELLHCAHEAEEAGIWQHVVQELPGRLSFLGTRLTPPDAHVLGKALEAAGQDFSLDLRSTGICPSGLGSLVGLSCVTRFRAALSDTVALWESLRQHGETKLLQAAEEKFTIEPFKAKSLKDVEDLGKLVQTQRTRSSSEDTAGELPAVRDLKKLEFALGPVSGPQAFPKLVRILTAFSSLQHLDLDALSENKIGDEGVSQLSATFPQLKSLETLNLSQNNITDLGAYKLAEALPSLAASLLRLSLYNNCICDVGAESLARVLPDMVSLRVMDVQYNKFTAAGAQQLAASLRRCPHVETLAMWTPTIPFSVQEHLQQQDSRISLR

SEQ ID NO: 1579 - DNA, 4657 bp, Homo sapiens
  source 1..4657: mol_type = genomic DNA
ggttagtgatgaggctagtgatgaggctgtgtgcttctgagctgggcatccgaaggcatccttggggaagctgagggcacgaggaggggctgccagactccgggagctgctgcctggctgggattcctacacaatgcgttgcctggctccacgccctgctgggtcctacctgtcagagccccaaggcagctcacagtgtgccaccatggagttggggcccctagaaggtggctacctggagcttcttaacagcgatgctgaccccctgtgcctctaccacttctatgaccagatggacctggctggagaagaagagattgagctctactcagaacccgacacagacaccatcaactgcgaccagttcagcaggctgttgtgtgacatggaaggtgatgaagagaccagggaggcttatgccaatatcgcggaactggaccagtatgtcttccaggactcccagctggagggcctgagcaaggacattttcatagagcacataggaccagatgaagtgatcggtgagagtatggagatgccagcagaagttgggcagaaaagtcagaaaagacccttcccagaggagcttccggcagacctgaagcactggaagccagctgagccccccactgtggtgactggcagtctcctagtgggaccagtgagcgactgctccaccctgccctgcctgccactgcctgcgctgttcaaccaggagccagcctccggccagatgcgcctggagaaaaccgaccagattcccatgcctttctccagttcctcgttgagctgcctgaatctccctgagggacccatccagtttgtccccaccatctccactctgccccatgggctctggcaaatctctgaggctggaacaggggtctccagtatattcatctaccatggtgaggtgccccaggccagccaagtaccccctcccagtggattcactgtccacggcctcccaacatctccagaccggccaggctccaccagccccttcgctccatcagccactgacctgcccagcatgcctgaacctgccctgacctcccgagcaaacatgacagagcacaagacgtcccccacccaatgcccggcagctggagaggtctccaacaagcttccaaaatggcctgagccggtggagcagttctaccgctcactgcaggacacgtatggtgccgagcccgcaggcccggatggcatcctagtggaggtggatctggtgcaggccaggctggagaggagcagcagcaagagcctggagcgggaactggccaccccggactgggcagaacggcagctggcccaaggaggcctggctgaggtgctgttggctgccaaggagcaccggcggccgcgtgagacacgagtgattgctgtgctgggcaaagctggtcagggcaagagctattgggctggggcagtgagccgggcctgggcttgtggccggcttccccagtacgactttgtcttctctgtcccctgccattgcttgaaccgtccgggggatgcctatggcctgcaggatctgctcttctccctgggcccacagccactcgtggcggccgatgaggttttcagccacatcttgaagagacctgaccgcgttctgctcatcctagacggcttcgaggagctggaagcgcaagatggcttcctgcacagcacgtgcggaccggcaccggcggagccctgctccctccgggggctgctggccggccttttccagaagaagctgctccgaggttgcaccctcctcctcacagcccggccccggggccgcctggtccagagcctgagcaaggccgacgccctatttgagctgtccggcttctccatggagcaggcccaggcatacgtgatgcgctactttgagagctcagggatgacagagcaccaagacagagccctgacgctcctccgggaccggccacttcttctcagtcacagccacagccctactttgtgccgggcagtgtgccagctctcagaggccctgctggagcttggggaggacgccaagctgccctccacgctcacgggactctatgtcggcctgctgggccgtgcagccctcgacagcccccccggggccctggcagagctggccaagctggcctgggagctgggccgcagacatcaaagtaccctacaggaggaccagttcccatccgcagacgtgaggacctgggcgatggccaaaggcttagtccaacacccaccgcgggccgcagagtccgagctggccttccccagcttcctcctgcaatgcttcctgggggccctgtggctggctctgagtggcgaaatcaaggacaaggagctcccgcagtacctagcattgaccccaaggaagaagaggccctatgacaactggctggagggcgtgccacgctttctggctgggctgatcttccagcctcccgcccgctgcctgggagccctactcgggccatcggcggctgcctcggtggacaggaagcagaaggtgcttgcgaggtacctgaagcggctgcagccggggacactgcgggcgcggcagctgctggagctgctgcactgcgcccacgaggccgaggaggctggaatttggcagcacgtggtacaggagctccccggccgcctctcttttctgggcacccgcctcacgcctcctgatgcacatgtactgggcaaggccttggaggcggcgggccaagacttctccctggacctccgcagcactggcatttgcccctctggattggggagcctcgtgggactcagctgtgtcacccgtttcagggctgccttgagcgacacggtggcgctgtgggagtccctgcagcagcatggggagaccaagctacttcaggcagcagaggagaagttcaccatcgagcctttcaaagccaagtccctgaaggatgtggaagacctgggaaagcttgtgcagactcagaggacgagaagttcctcggaagacacagctggggagctccctgctgttcgggacctaaagaaactggagtttgcgctgggccctgtctcaggcccccaggctttccccaaactggtgcggatcctcacggccttttcctccctgcagcatctggacctggatgcgctgagtgagaacaagatcggggacgagggtgtctcgcagctctcagccaccttcccccagctgaagtccttggaaaccctcaatctgtcccagaacaacatcactgacctgggtgcctacaaactcgccgaggccctgccttcgctcgctgcatccctgctcaggctaagcttgtacaataactgcatctgcgacgtgggagccgagagcttggctcgtgtgcttccggacatggtgtccctccgggtgatggacgtccagtacaacaagttcacggctgccggggcccagcagctcgctgccagccttcggaggtgtcctcatgtggagacgctggcgatgtggacgcccaccatcccattcagtgtccaggaacacctgcaacaacaggattcacggatcagcctgagatgatcccagctgtgctctggacaggcatgttctctgaggacactaaccacgctggaccttgaactgggtacttgtggacacagctcttctccaggctgtatcccatgagcctcagcatcctggcacccggcccctgctggttcagggttggcccctgcccggctgcggaatgaaccacatcttgctctgctgacagacacaggcccggctccaggctcctttagcgcccagttgggtggatgcctggtggcagctgcggtccacccaggagccccgaggccttctctgaaggacattgcggacagccacggccaggccagagggagtgacagaggcagccccattctgcctgcccaggcccctgccaccctggggagaaagtacttctttttttttatttttagacagagtctcactgttgcccaggctggcgtgcagtggtgcgatctgggttcactgcaacctccgcctcttgggttcaagcgattcttctgcttcagcctcccgagtagctgggactacaggcacccaccatcatgtctggctaatttttcatttttagtagagacagggttttgccatgttggccaggctggtctcaaactcttgacctcaggtgatccacccacctcagcctcccaaagtgctgggattacaagcgtgagccactgcaccgggccacagagaaagtacttctccaccctgctctccgaccagacaccttgacagggcacaccgggcactcagaagacactgatgggcaacccccagcctgctaattccccagattgcaacaggctgggcttcagtggcagctgcttttgtctatgggactcaatgcactgacattgttggccaaagccaaagctaggcctggccagatgcaccagcccttagcagggaaacagctaatgggacactaatggggcggtgagaggggaacagactggaagcacagcttcatttcctgtgtcttttttcactacattataaatgtctctttaatgtcacaggcaggtccagggtttgagttcataccctgttaccattttggggtacccactgctctggttatctaatatgtaacaagccaccccaaatcatagtggcttaaaacaacactcacattta

SEQ ID NO: 1580 - protein, 140 aa, Homo sapiens
IQNPDPAVYQLRDSKSSDKSVCLFTDFDSQTNVSQSKDSDVYITDKTVLDMRSMDFKSNSAVAWSNKSDFACANAFNNSIIPEDTFFPSPESSCDVKLVEKSFETDTNLNFQNLSVIGFRILLLKVAGFNLLMTLRLWSS

SEQ ID NO: 1581 - DNA, 425 bp, Homo sapiens
  source 1..425: mol_type = genomic DNA
atatccagaaccctgaccctgccgtgtaccagctgagagactctaaatccagtgacaagtctgtctgcctattcaccgattttgattctcaaacaaatgtgtcacaaagtaaggattctgatgtgtatatcacagacaaaactgtgctagacatgaggtctatggacttcaagagcaacagtgctgtggcctggagcaacaaatctgactttgcatgtgcaaacgccttcaacaacagcattattccagaagacaccttcttccccagcccagaaagttcctgtgatgtcaagctggtcgagaaaagctttgaaacagatacgaacctaaactttcaaaacctgtcagtgattgggttccgaatcctcctcctgaaagtggccgggtttaatctgctcatgacgctgcggctgtggtccagctga

SEQ ID NO: 1582 - RNA, 56 nt, synthetic construct
  source 1..56: mol_type = other RNA
ctttcaagactaatagattgctccttacgaggagacgggccgagatgtctcgctcc

SEQ ID NO: 1583 - DNA, 20 bp, synthetic construct
  source 1..20: mol_type = other DNA
ggccgagatgtctcgctccg

SEQ ID NO: 1584 - protein, 18 aa, synthetic construct
KRPAATKKAGQAKKKKEF

SEQ ID NO: 1585 - protein, 7 aa, synthetic construct
PKKKRKV

SEQ ID NO: 1586 - protein, 9 aa, synthetic construct
PAAKRVKLD

SEQ ID NO: 1587 - protein, 15 aa, synthetic construct
PKKKRKVGIHGVPAA

SEQ ID NO: 1588 - RNA, 33 nt, synthetic construct
  source 1..33: mol_type = other RNA
cgttgcagctcgcacgttggcactggttgaagg

SEQ ID NO: 1589 - RNA, 32 nt, synthetic construct
  source 1..32: mol_type = other RNA
gttgcaactcacgcgcgtatgtggcttgaagg

SEQ ID NO: 1590 - RNA, 32 nt, synthetic construct
  source 1..32: mol_type = other RNA
gttgcaattcatatctccgggtggattgaagg

SEQ ID NO: 1591 - RNA, 32 nt, synthetic construct
  source 1..32: mol_type = other RNA
gttgcagcgtgcgcgagcgtgtggcttgaagg

SEQ ID NO: 1592 - RNA, 32 nt, synthetic construct
  source 1..32: mol_type = other RNA
gttgcaactcgcacgtgaatgcgacttgaagg

SEQ ID NO: 1593 - RNA, 32 nt, synthetic construct
  source 1..32: mol_type = other RNA
gatgcaactcgtgtgtatgtgcgagttgaagg

SEQ ID NO: 1594 - RNA, 32 nt, synthetic construct
  source 1..32: mol_type = other RNA
gacgcaactcgcgcgcgggcatgtattgaggg

SEQ ID NO: 1595 - RNA, 32 nt, synthetic construct
  source 1..32: mol_type = other RNA
gatgcatctgacacagctgggtgagttgaagg

SEQ ID NO: 1596 - RNA, 32 nt, synthetic construct
  source 1..32: mol_type = other RNA
gttgcaacacatgtatgtgggtgagttgaagg

SEQ ID NO: 1597 - RNA, 32 nt, synthetic construct
  source 1..32: mol_type = other RNA
gttgcaatttgtatacgagtgtgacttgaagg

SEQ ID NO: 1598 - RNA, 32 nt, synthetic construct
  source 1..32: mol_type = other RNA
gctgcaacacgcgcgggtacgcgggttgaagg

SEQ ID NO: 1599 - RNA, 32 nt, synthetic construct
  source 1..32: mol_type = other RNA
gttgcaactcgcacgttggcactgattgaagg

SEQ ID NO: 1600 - RNA, 36 nt, synthetic construct
  source 1..36: mol_type = other RNA
gctgtagccctgctcaaattgtagggcgcatgcagg

SEQ ID NO: 1601 - RNA, 36 nt, synthetic construct
  source 1..36: mol_type = other RNA
gttgtagtcgacctgaatctgtggggtgcttacagg

SEQ ID NO: 1602 - RNA, 36 nt, synthetic construct
  source 1..36: mol_type = other RNA
ggtgtatgtaaccgcaatttgaagggtgcatacagg

SEQ ID NO: 1603 - RNA, 36 nt, synthetic construct
  source 1..36: mol_type = other RNA
gttggaatcgaccttaatttgaggtgtgcttacagg

SEQ ID NO: 1604 - RNA, 36 nt, synthetic construct
  source 1..36: mol_type = other RNA
gctgaaagagcagagaatttgttgtgtgcatacagg

SEQ ID NO: 1605 - RNA, 36 nt, synthetic construct
  source 1..36: mol_type = other RNA
gttggagtcggcttgaatctgcggggtgcttacagg

SEQ ID NO: 1606 - RNA, 36 nt, synthetic construct
  source 1..36: mol_type = other RNA
gttgtaagagacccgaattttagctgtgtatacagg

SEQ ID NO: 1607 - RNA, 36 nt, synthetic construct
  source 1..36: mol_type = other RNA
gttgtgaatgcaggcatttttgatggtaaatccaac

SEQ ID NO: 1608 - RNA, 36 nt, synthetic construct
  source 1..36: mol_type = other RNA
actgtcagacaatgcaaaatgtgtggtacatccaac

SEQ ID NO: 1609 - RNA, 36 nt, synthetic construct
  source 1..36: mol_type = other RNA
gctgtcagtagtagtaaaaatgggggtacatccaac

SEQ ID NO: 1610 - RNA, 36 nt, synthetic construct
  source 1..36: mol_type = other RNA
actgtcagtacatgcaaaaatgagggtacatccaac

SEQ ID NO: 1611 - RNA, 36 nt, synthetic construct
  source 1..36: mol_type = other RNA
actgtcagacaatgcaaaatgagtggtacatccaac

SEQ ID NO: 1612 - RNA, 36 nt, synthetic construct
  source 1..36: mol_type = other RNA
gctgttagaacatacaaaatgaaaggtacatccaac

SEQ ID NO: 1613 - RNA, 36 nt, synthetic construct
  source 1..36: mol_type = other RNA
gctgcatgtcatggcaaaaggaaaggtacatccaac

SEQ ID NO: 1614 - RNA, 36 nt, synthetic construct
  source 1..36: mol_type = other RNA
gctgtcagacacctaaaaaatgagggtacatccaac

SEQ ID NO: 1615 - RNA, 36 nt, synthetic construct
  source 1..36: mol_type = other RNA
gctgtgagtcacagtaaaaatgaaggtatatccaac

SEQ ID NO: 1616 - RNA, 36 nt, synthetic construct
  source 1..36: mol_type = other RNA
gatgtatatgctatgattttgtatggtacatccaac

SEQ ID NO: 1617 - RNA, 33 nt, synthetic construct
  source 1..33: mol_type = other RNA
gttgagctctgcattacgcagatgaatgacgag

SEQ ID NO: 1618 - RNA, 32 nt, synthetic construct
  source 1..32: mol_type = other RNA
gatgcaacttagatgcatatgtaagttgtgag

SEQ ID NO: 1619 - RNA, 32 nt, synthetic construct
  source 1..32: mol_type = other RNA
gttgcaatctgcgtacaggcgtaagatgtgag

SEQ ID NO: 1620 - RNA, 32 nt, synthetic construct
  source 1..32: mol_type = other RNA
gatcatatctgcttgtatgggtatgctgcgag

SEQ ID NO: 1621 - RNA, 32 nt, synthetic construct
  source 1..32: mol_type = other RNA
gttgcaacttacgcataggtgtaaaatacgag

SEQ ID NO: 1622 - RNA, 32 nt, synthetic construct
  source 1..32: mol_type = other RNA
gattatatctgcttgtatgggtatactgcgag

SEQ ID NO: 1623 - RNA, 38 nt, synthetic construct
  source 1..38: mol_type = other RNA
tcagctcacaacctacatatgcatacaagatatatcgt

SEQ ID NO: 1624 - RNA, 32 nt, synthetic construct
  source 1..32: mol_type = other RNA
gatatatcttgtatgcatatgtaggttgtgag

SEQ ID NO: 1625 - RNA, 32 nt, synthetic construct
  source 1..32: mol_type = other RNA
gttgcaatgaacgtatgtgcatgaggtgtgag

SEQ ID NO: 1626 - RNA, 20 nt, synthetic construct
  source 1..20: mol_type = other RNA
ctcgcgctactctctctttc

SEQ ID NO: 1627 - RNA, 20 nt, synthetic construct
  source 1..20: mol_type = other RNA
ggtttcatccatccgacatt

SEQ ID NO: 1628 - RNA, 20 nt, synthetic construct
  source 1..20: mol_type = other RNA
ctacactgaattcaccccca

SEQ ID NO: 1629 - RNA, 20 nt, synthetic construct
  source 1..20: mol_type = other RNA
tctcttgtactacactgaat

SEQ ID NO: 1630 - RNA, 20 nt, synthetic construct
  source 1..20: mol_type = other RNA
ctcacgtcatccagcagaga

SEQ ID NO: 1631 - RNA, 20 nt, synthetic construct
  source 1..20: mol_type = other RNA
tgtctgggtttcatccatcc

SEQ ID NO: 1632 - RNA, 20 nt, synthetic construct
  source 1..20: mol_type = other RNA
cctgccgtgtgaaccatgtg

SEQ ID NO: 1633 - RNA, 20 nt, synthetic construct
  source 1..20: mol_type = other RNA
actttgtcacagcccaagat

SEQ ID NO: 1634 - RNA, 20 nt, synthetic construct
  source 1..20: mol_type = other RNA
tctgggtttcatccatccga

SEQ ID NO: 1635 - RNA, 20 nt, synthetic construct
  source 1..20: mol_type = other RNA
aaccatgtgactttgtcaca

SEQ ID NO: 1636 - RNA, 20 nt, synthetic construct
  source 1..20: mol_type = other RNA
aatgctccactttttcaatt

SEQ ID NO: 1637 - RNA, 20 nt, synthetic construct
  source 1..20: mol_type = other RNA
actttccattctctgctgga

SEQ ID NO: 1638 - RNA, 20 nt, synthetic construct
  source 1..20: mol_type = other RNA
acaaagtcacatggttcaca

SEQ ID NO: 1639 - RNA, 20 nt, synthetic construct
  source 1..20: mol_type = other RNA
gtacaagagatagaaagacc

SEQ ID NO: 1640 - RNA, 20 nt, synthetic construct
  source 1..20: mol_type = other RNA
ctggatgacgtgagtaaacc

SEQ ID NO: 1641 - RNA, 20 nt, synthetic construct
  source 1..20: mol_type = other RNA
gtttatttttgttccacaag

SEQ ID NO: 1642 - RNA, 20 nt, synthetic construct
  source 1..20: mol_type = other RNA
cacaaaatgtagggttataa

SEQ ID NO: 1643 - RNA, 20 nt, synthetic construct
  source 1..20: mol_type = other RNA
ggggaaaatttagaaatata

SEQ ID NO: 1644 - RNA, 20 nt, synthetic construct
  source 1..20: mol_type = other RNA
cttgcttgctttttaatatt

SEQ ID NO: 1645 - RNA, 20 nt, synthetic construct
  source 1..20: mol_type = other RNA
ctttgagtgctgtctccatg

SEQ ID NO: 1646 - RNA, 20 nt, synthetic construct
  source 1..20: mol_type = other RNA
ataaagtaaggcatggttgt

SEQ ID NO: 1647 - RNA, 20 nt, synthetic construct
  source 1..20: mol_type = other RNA
gttaatctggtttatttttg

SEQ ID NO: 1648 - RNA, 20 nt, synthetic construct
  source 1..20: mol_type = other RNA
atgtatctgagcaggttgct

SEQ ID NO: 1649 - RNA, 20 nt, synthetic construct
  source 1..20: mol_type = other RNA
cttagaatttgggggaaaat

SEQ ID NO: 1650 - RNA, 20 nt, synthetic construct
  source 1..20: mol_type = other RNA
gattggatgaattccaaatt

SEQ ID NO: 1651 - RNA, 20 nt, synthetic construct
  source 1..20: mol_type = other RNA
tgcacaaaatgtagggttat

SEQ ID NO: 1652 - RNA, 20 nt, synthetic construct
  source 1..20: mol_type = other RNA
gaaatataattgacaggatt

SEQ ID NO: 1653 - RNA, 20 nt, synthetic construct
  source 1..20: mol_type = other RNA
agtgctgtctccatgtttga

SEQ ID NO: 1654 - RNA, 20 nt, synthetic construct
  source 1..20: mol_type = other RNA
ggagggctggcaacttagag

SEQ ID NO: 1655 - RNA, 20 nt, synthetic construct
  source 1..20: mol_type = other RNA
aactcttcaatctcttgcac

SEQ ID NO: 1656 - RNA, 20 nt, synthetic construct
  source 1..20: mol_type = other RNA
ataatgttaacatggacatg

SEQ ID NO: 1657 - RNA, 20 nt, synthetic construct
  source 1..20: mol_type = other RNA
cttatacacttacactttat

SEQ ID NO: 1658 - RNA, 20 nt, synthetic construct
  source 1..20: mol_type = other RNA
atattgatatgcttatacac

SEQ ID NO: 1659 - RNA, 20 nt, synthetic construct
  source 1..20: mol_type = other RNA
gggttataataatgttaaca

SEQ ID NO: 1660 - RNA, 20 nt, synthetic construct
  source 1..20: mol_type = other RNA
catttgataaagtaaggcat

SEQ ID NO: 1661 - RNA, 20 nt, synthetic construct
  source 1..20: mol_type = other RNA
tttttgttccacaagttaaa

SEQ ID NO: 1662 - RNA, 20 nt, synthetic construct
  source 1..20: mol_type = other RNA
ttccacaagttaaataaatc

SEQ ID NO: 1663 - RNA, 20 nt, synthetic construct
  source 1..20: mol_type = other RNA
tctgagcaggttgctccaca

SEQ ID NO: 1664 - RNA, 20 nt, synthetic construct
  source 1..20: mol_type = other RNA
attctactttgagtgctgtc

SEQ ID NO: 1665 - RNA, 20 nt, synthetic construct
  source 1..20: mol_type = other RNA
agcaggttgctccacaggta

SEQ ID NO: 1666 - RNA, 20 nt, synthetic construct
  source 1..20: mol_type = other RNA
attgacaggattattggaaa

SEQ ID NO: 1667 - RNA, 20 nt, synthetic construct
  source 1..20: mol_type = other RNA
aagatgccgcatttggattg

SEQ ID NO: 1668 - RNA, 20 nt, synthetic construct
  source 1..20: mol_type = other RNA
atgaatgaaacattttgtca

SEQ ID NO: 1669 - RNA, 20 nt, synthetic construct
  source 1..20: mol_type = other RNA
catactctgcttagaatttg

SEQ ID NO: 1670 - RNA, 20 nt, synthetic construct
  source 1..20: mol_type = other RNA
taattctactttgagtgctg

SEQ ID NO: 1671 - RNA, 20 nt, synthetic construct
  source 1..20: mol_type = other RNA
cacttacactttatgcacaa

SEQ ID NO: 1672 - RNA, 20 nt, synthetic construct
  source 1..20: mol_type = other RNA
accaagatgttgatgttgga

SEQ ID NO: 1673 - RNA, 20 nt, synthetic construct
  source 1..20: mol_type = other RNA
cataaagtgtaagtgtataa

SEQ ID NO: 1674 - RNA, 20 nt, synthetic construct
  source 1..20: mol_type = other RNA
gaacaaaaataaaccagatt

SEQ ID NO: 1675 - RNA, 20 nt, synthetic construct
  source 1..20: mol_type = other RNA
ctccccacctctaagttgcc

SEQ ID NO: 1676 - RNA, 20 nt, synthetic construct
  source 1..20: mol_type = other RNA
agttgccagccctcctagag

SEQ ID NO: 1677 - RNA, 20 nt, synthetic construct
  source 1..20: mol_type = other RNA
aattggaagttaacttatgc

SEQ ID NO: 1678 - RNA, 20 nt, synthetic construct
  source 1..20: mol_type = other RNA
agcagagtatgtaaattgga

SEQ ID NO: 1679 - RNA, 20 nt, synthetic construct
  source 1..20: mol_type = other RNA
acaaatttccaataatcctg

SEQ ID NO: 1680 - RNA, 20 nt, synthetic construct
  source 1..20: mol_type = other RNA
cacgcttaactatcttaaca

SEQ ID NO: 1681 - RNA, 20 nt, synthetic construct
  source 1..20: mol_type = other RNA
tttaacttgtggaacaaaaa

SEQ ID NO: 1682 - RNA, 20 nt, synthetic construct
  source 1..20: mol_type = other RNA
tgatttatttaacttgtgga

SEQ ID NO: 1683 - RNA, 20 nt, synthetic construct
  source 1..20: mol_type = other RNA
gagcaacctgctcagataca

SEQ ID NO: 1684 - RNA, 20 nt, synthetic construct
  source 1..20: mol_type = other RNA
acttgtggaacaaaaataaa

SEQ ID NO: 1685 - RNA, 20 nt, synthetic construct
  source 1..20: mol_type = other RNA
agtgcaagagattgaagagt

SEQ ID NO: 1686 - RNA, 20 nt, synthetic construct
  source 1..20: mol_type = other RNA
agtgtataagcatatcaata

SEQ ID NO: 1687 - RNA, 20 nt, synthetic construct
  source 1..20: mol_type = other RNA
atttatttaacttgtggaac

SEQ ID NO: 1688 - RNA, 20 nt, synthetic construct
  source 1..20: mol_type = other RNA
tgacaaaatgtttcattcat

SEQ ID NO: 1689 - RNA, 20 nt, synthetic construct
  source 1..20: mol_type = other RNA
tgcataaagtgtaagtgtat

SEQ ID NO: 1690 - RNA, 20 nt, synthetic construct
  source 1..20: mol_type = other RNA
aagaagatcatgtccatgtt

SEQ ID NO: 1691 - RNA, 20 nt, synthetic construct
  source 1..20: mol_type = other RNA
aattttcccccaaattctaa

SEQ ID NO: 1692 - RNA, 20 nt, synthetic construct
  source 1..20: mol_type = other RNA
gaattcatccaatccaaatg

SEQ ID NO: 1693 - RNA, 20 nt, synthetic construct
  source 1..20: mol_type = other RNA
tttctaaattttcccccaaa

SEQ ID NO: 1694 - RNA, 20 nt, synthetic construct
  source 1..20: mol_type = other RNA
accctacattttgtgcataa

SEQ ID NO: 1695 - RNA, 20 nt, synthetic construct
  source 1..20: mol_type = other RNA
aatataagtggaggcgtcgc

SEQ ID NO: 1696 - RNA, 20 nt, synthetic construct
  source 1..20: mol_type = other RNA
atataagtggaggcgtcgcg

SEQ ID NO: 1697 - RNA, 20 nt, synthetic construct
  source 1..20: mol_type = other RNA
aggaatgcccgccagcgcga

SEQ ID NO: 1698 - RNA, 20 nt, synthetic construct
  source 1..20: mol_type = other RNA
ctgaagctgacagcattcgg

SEQ ID NO: 1699 - RNA, 20 nt, synthetic construct
  source 1..20: mol_type = other RNA
gggccgagatgtctcgctcc

SEQ ID NO: 1700 - RNA, 20 nt, synthetic construct
  source 1..20: mol_type = other RNA
gctgtgctcgcgctactctc

SEQ ID NO: 1701 - RNA, 20 nt, synthetic construct
  source 1..20: mol_type = other RNA
ctggcctggaggctatccag

SEQ ID NO: 1702 - RNA, 20 nt, synthetic construct
  source 1..20: mol_type = other RNA
tggcctggaggctatccagc

SEQ ID NO: 1703 - RNA, 20 nt, synthetic construct
  source 1..20: mol_type = other RNA
atgtgtcttttcccgatatt

SEQ ID NO: 1704 - RNA, 20 nt, synthetic construct
  source 1..20: mol_type = other RNA
tcccgatattcctcaggtac

SEQ ID NO: 1705 - RNA, 20 nt, synthetic construct
  source 1..20: mol_type = other RNA
cccgatattcctcaggtact

SEQ ID NO: 1706 - RNA, 20 nt, synthetic construct
  source 1..20: mol_type = other RNA
ccgatattcctcaggtactc

SEQ ID NO: 1707 - RNA, 20 nt, synthetic construct
  source 1..20: mol_type = other RNA
gagtacctgaggaatatcgg

SEQ ID NO: 1708 - RNA, 20 nt, synthetic construct
  source 1..20: mol_type = other RNA
ggagtacctgaggaatatcg

SEQ ID NO: 1709 - RNA, 20 nt, synthetic construct
  source 1..20: mol_type = other RNA
ctcaggtactccaaagattc

SEQ ID NO: 1710 - RNA, 20 nt, synthetic construct
  source 1..20: mol_type = other RNA
aggtttactcacgtcatcca

SEQ ID NO: 1711 - RNA, 20 nt, synthetic construct
  source 1..20: mol_type = other RNA
actcacgtcatccagcagag

SEQ ID NO: 1712 - RNA, 20 nt, synthetic construct
  source 1..20: mol_type = other RNA
tctgctggatgacgtgagta

SEQ ID NO: 1713 - RNA, 20 nt, synthetic construct
  source 1..20: mol_type = other RNA
cattctctgctggatgacgt

SEQ ID NO: 1714 - RNA, 20 nt, synthetic construct
  source 1..20: mol_type = other RNA
ccattctctgctggatgacg

SEQ ID NO: 1715 - RNA, 20 nt, synthetic construct
  source 1..20: mol_type = other RNA
gactttccattctctgctgg

SEQ ID NO: 1716 - RNA, 20 nt, synthetic construct
  source 1..20: mol_type = other RNA
aggaaatttgactttccatt

SEQ ID NO: 1717 - RNA, 20 nt, synthetic construct
  source 1..20: mol_type = other RNA
cctgaattgctatgtgtctg

SEQ ID NO: 1718 - RNA, 20 nt, synthetic construct
  source 1..20: mol_type = other RNA
ctgaattgctatgtgtctgg

SEQ ID NO: 1719 - RNA, 20 nt, synthetic construct
  source 1..20: mol_type = other RNA
ctatgtgtctgggtttcatc

SEQ ID NO: 1720 - RNA, 20 nt, synthetic construct
  source 1..20: mol_type = other RNA
aatgtcggatggatgaaacc

SEQ ID NO: 1721 - RNA, 20 nt, synthetic construct
  source 1..20: mol_type = other RNA
catccatccgacattgaagt

SEQ ID NO: 1722 - RNA, 20 nt, synthetic construct
  source 1..20: mol_type = other RNA
atccatccgacattgaagtt

SEQ ID NO: 1723 - RNA, 20 nt, synthetic construct
  source 1..20: mol_type = other RNA
agtaagtcaacttcaatgtc

SEQ ID NO: 1724 - RNA, 20 nt, synthetic construct
  source 1..20: mol_type = other RNA
ttcagtaagtcaacttcaat

SEQ ID NO: 1725 - RNA, 20 nt, synthetic construct
  source 1..20: mol_type = other RNA
aagttgacttactgaagaat

SEQ ID NO: 1726 - RNA, 20 nt, synthetic construct
  source 1..20: mol_type = other RNA
acttactgaagaatggagag

SEQ ID NO: 1727 - RNA, 20 nt, synthetic construct
  source 1..20: mol_type = other RNA
tctctccattcttcagtaag

SEQ ID NO: 1728 - RNA, 20 nt, synthetic construct
  source 1..20: mol_type = other RNA
ctgaagaatggagagagaat

SEQ ID NO: 1729 - RNA, 20 nt, synthetic construct
  source 1..20: mol_type = other RNA
aattctctctccattcttca

SEQ ID NO: 1730 - RNA, 20 nt, synthetic construct
  source 1..20: mol_type = other RNA
caattctctctccattcttc

SEQ ID NO: 1731 - RNA, 20 nt, synthetic construct
  source 1..20: mol_type = other RNA
tcaattctctctccattctt

SEQ ID NO: 1732 - RNA, 20 nt, synthetic construct
  source 1..20: mol_type = other RNA
ttcaattctctctccattct

SEQ ID NO: 1733 - RNA, 20 nt, synthetic construct
  source 1..20: mol_type = other RNA
aaaaagtggagcattcagac

SEQ ID NO: 1734 - RNA, 20 nt, synthetic construct
  source 1..20: mol_type = other RNA
ctgaaagacaagtctgaatg

SEQ ID NO: 1735 - RNA, 20 nt, synthetic construct
  source 1..20: mol_type = other RNA
agacttgtctttcagcaagg

SEQ ID NO: 1736 - RNA, 20 nt, synthetic construct
  source 1..20: mol_type = other RNA
tctttcagcaaggactggtc

SEQ ID NO: 1737 - RNA, 20 nt, synthetic construct
  source 1..20: mol_type = other RNA
cagcaaggactggtctttct

SEQ ID NO: 1738 - RNA, 20 nt, synthetic construct
  source 1..20: mol_type = other RNA
agcaaggactggtctttcta

SEQ ID NO: 1739 - RNA, 20 nt, synthetic construct
  source 1..20: mol_type = other RNA
ctatctcttgtactacactg

SEQ ID NO: 1740 - RNA, 20 nt, synthetic construct
  source 1..20: mol_type = other RNA
tatctcttgtactacactga

SEQ ID NO: 1741 - RNA, 20 nt, synthetic construct
  source 1..20: mol_type = other RNA
agtgtagtacaagagataga

SEQ ID NO: 1742 - RNA, 20 nt, synthetic construct
  source 1..20: mol_type = other RNA
tactacactgaattcacccc

SEQ ID NO: 1743 - RNA, 20 nt, synthetic construct
  source 1..20: mol_type = other RNA
agtgggggtgaattcagtgt

SEQ ID NO: 1744 - RNA, 20 nt, synthetic construct
  source 1..20: mol_type = other RNA
cagtgggggtgaattcagtg

SEQ ID NO: 1745 - RNA, 20 nt, synthetic construct
  source 1..20: mol_type = other RNA
tcagtgggggtgaattcagt

SEQ ID NO: 1746 - RNA, 20 nt, synthetic construct
  source 1..20: mol_type = other RNA
ttcagtgggggtgaattcag

SEQ ID NO: 1747 - RNA, 20 nt, synthetic construct
  source 1..20: mol_type = other RNA
acccccactgaaaaagatga

SEQ ID NO: 1748 - RNA, 20 nt, synthetic construct
  source 1..20: mol_type = other RNA
acacggcaggcatactcatc

SEQ ID NO: 1749 - RNA, 20 nt, synthetic construct
  source 1..20: mol_type = other RNA
ggctgtgacaaagtcacatg

SEQ ID NO: 1750 - RNA, 20 nt, synthetic construct
  source 1..20: mol_type = other RNA
gtcacagcccaagatagtta

SEQ ID NO: 1751 - RNA, 20 nt, synthetic construct
  source 1..20: mol_type = other RNA
actatcttgggctgtgacaa

SEQ ID NO: 1752 - RNA, 20 nt, synthetic construct
  source 1..20: mol_type = other RNA
ccccacttaactatcttggg

SEQ ID NO: 1753 - skipped

SEQ ID NO: 1754 - RNA, 20 nt, synthetic construct
  source 1..20: mol_type = other RNA
tgcttctgagctgggcatcc

SEQ ID NO: 1755 - RNA, 20 nt, synthetic construct
  source 1..20: mol_type = other RNA
agctgggcatccgaaggcat

SEQ ID NO: 1756 - RNA, 20 nt, synthetic construct
  source 1..20: mol_type = other RNA
cttctgagctgggcatccga

SEQ ID NO: 1757 - RNA, 20 nt, synthetic construct
  source 1..20: mol_type = other RNA
ggaatcccagccaggcagca

SEQ ID NO: 1758 - RNA, 20 nt, synthetic construct
  source 1..20: mol_type = other RNA
taggaatcccagccaggcag

SEQ ID NO: 1759 - RNA, 20 nt, synthetic construct
  source 1..20: mol_type = other RNA
gcagcccctcctcgtgccct

SEQ ID NO: 1760 - RNA, 20 nt, synthetic construct
  source 1..20: mol_type = other RNA
acaggtaggacccagcaggg

SEQ ID NO: 1761 - RNA, 20 nt, synthetic construct
  source 1..20: mol_type = other RNA
tgaccagatggacctggctg

SEQ ID NO: 1762 - RNA, 20 nt, synthetic construct
  source 1..20: mol_type = other RNA
ccacttctatgaccagatgg

SEQ ID NO: 1763 - RNA, 20 nt, synthetic construct
  source 1..20: mol_type = other RNA
accagatggacctggctgga

SEQ ID NO: 1764 - RNA, 20 nt, synthetic construct
  source 1..20: mol_type = other RNA
ccaccatggagttggggccc

SEQ ID NO: 1765 - RNA, 20 nt, synthetic construct
  source 1..20: mol_type = other RNA
cctctaccacttctatgacc

SEQ ID NO: 1766 - RNA, 20 nt, synthetic construct
  source 1..20: mol_type = other RNA
ggggccccaactccatggtg

SEQ ID NO: 1767 - RNA, 20 nt, synthetic construct
  source 1..20: mol_type = other RNA
gtcatagaagtggtagaggc

SEQ ID NO: 1768 - RNA, 20 nt, synthetic construct
  source 1..20: mol_type = other RNA
acatggaaggtgatgaagag

SEQ ID NO: 1769 - RNA, 20 nt, synthetic construct
  source 1..20: mol_type = other RNA
tgacatggaaggtgatgaag

SEQ ID NO: 1770 - RNA, 20 nt, synthetic construct
  source 1..20: mol_type = other RNA
tcttccaggactcccagctg

SEQ ID NO: 1771 - RNA, 20 nt, synthetic construct
  source 1..20: mol_type = other RNA
ctacacaatgcgttgcctgg

SEQ ID NO: 1772 - RNA, 20 nt, synthetic construct
  source 1..20: mol_type = other RNA
gggctctgacaggtaggacc

SEQ ID NO: 1773 - RNA, 20 nt, synthetic construct
  source 1..20: mol_type = other RNA
tgtaggaatcccagccaggc

SEQ ID NO: 1774 - RNA, 20 nt, synthetic construct
  source 1..20: mol_type = other RNA
cctggctccacgccctgctg

SEQ ID NO: 1775 - RNA, 20 nt, synthetic construct
  source 1..20: mol_type = other RNA
gggaagctgagggcacgagg

SEQ ID NO: 1776 - RNA, 20 nt, synthetic construct
  source 1..20: mol_type = other RNA
acagcgatgctgaccccctg

SEQ ID NO: 1777 - RNA, 20 nt, synthetic construct
  source 1..20: mol_type = other RNA
ttaacagcgatgctgacccc

SEQ ID NO: 1778 - RNA, 20 nt, synthetic construct
  source 1..20: mol_type = other RNA
tatgaccagatggacctggc

SEQ ID NO: 1779 - RNA, 20 nt, synthetic construct
  source 1..20: mol_type = other RNA
gggcccctagaaggtggcta

SEQ ID NO: 1780 - RNA, 20 nt, synthetic construct
  source 1..20: mol_type = other RNA
taggggccccaactccatgg

SEQ ID NO: 1781 - RNA, 20 nt, synthetic construct
  source 1..20: mol_type = other RNA
agaagctccaggtagccacc

SEQ ID NO: 1782 - RNA, 20 nt, synthetic construct
  source 1..20: mol_type = other RNA
tccagccaggtccatctggt

SEQ ID NO: 1783 - RNA, 20 nt, synthetic construct
  source 1..20: mol_type = other RNA
ttctccagccaggtccatct

SEQ ID NO: 1784 - RNA, 20 nt, synthetic construct
  source 1..20: mol_type = other RNA
agcaggctgttgtgtgacat

SEQ ID NO: 1785 - RNA, 20 nt, synthetic construct
  source 1..20: mol_type = other RNA
catgtcacacaacagcctgc

SEQ ID NO: 1786 - RNA, 20 nt, synthetic construct
  source 1..20: mol_type = other RNA
tgtgacatggaaggtgatga

SEQ ID NO: 1787 - RNA, 20 nt, synthetic construct
  source 1..20: mol_type = other RNA
atcaccttccatgtcacaca

SEQ ID NO: 1788 - RNA, 20 nt, synthetic construct
  source 1..20: mol_type = other RNA
gcataagcctccctggtctc

SEQ ID NO: 1789 - RNA, 20 nt, synthetic construct
  source 1..20: mol_type = other RNA
caggactcccagctggaggg

SEQ ID NO: 1790 - RNA, 20 nt, synthetic construct
  source 1..20: mol_type = other RNA
ctcaggccctccagctggga

SEQ ID NO: 1791 - RNA, 20 nt, synthetic construct
  source 1..20: mol_type = other RNA
tgctggcatctccatactct

SEQ ID NO: 1792 - RNA, 20 nt, synthetic construct
  source 1..20: mol_type = other RNA
tgcccaacttctgctggcat

SEQ ID NO: 1793 - RNA, 20 nt, synthetic construct
  source 1..20: mol_type = other RNA
ctgcccaacttctgctggca

SEQ ID NO: 1794 - RNA, 20 nt, synthetic construct
  source 1..20: mol_type = other RNA
tctgcccaacttctgctggc

SEQ ID NO: 1795 - RNA, 20 nt, synthetic construct
  source 1..20: mol_type = other RNA
tgacttttctgcccaacttc

SEQ ID NO: 1796 - RNA, 20 nt, synthetic construct
  source 1..20: mol_type = other RNA
ctgacttttctgcccaactt

SEQ ID NO: 1797 - RNA, 20 nt, synthetic construct
  source 1..20: mol_type = other RNA
tctgacttttctgcccaact

SEQ ID NO: 1798 - RNA, 20 nt, synthetic construct
  source 1..20: mol_type = other RNA
ccagaggagcttccggcaga

SEQ ID NO: 1799 - RNA, 20 nt, synthetic construct
  source 1..20: mol_type = other RNA
aggtctgccggaagctcctc

SEQ ID NO: 1800 - RNA, 20 nt, synthetic construct
  source 1..20: mol_type = other RNA
cggcagacctgaagcactgg

SEQ ID NO: 1801 - RNA, 20 nt, synthetic construct
  source 1..20: mol_type = other RNA
cagtgcttcaggtctgccgg

SEQ ID NO: 1802 - RNA, 20 nt, synthetic construct
  source 1..20: mol_type = other RNA
aacagcgcaggcagtggcag

SEQ ID NO: 1803 - RNA, 20 nt, synthetic construct
  source 1..20: mol_type = other RNA
aaccaggagccagcctccgg

SEQ ID NO: 1804 - RNA, 20 nt, synthetic construct
  source 1..20: mol_type = other RNA
tccaggcgcatctggccgga

SEQ ID NO: 1805 - RNA, 20 nt, synthetic construct
  source 1..20: mol_type = other RNA
ctccaggcgcatctggccgg

SEQ ID NO: 1806 - RNA, 20 nt, synthetic construct
  source 1..20: mol_type = other RNA
tctccaggcgcatctggccg

SEQ ID NO: 1807 - RNA, 20 nt, synthetic construct
  source 1..20: mol_type = other RNA
ctccagttcctcgttgagct

SEQ ID NO: 1808 - RNA, 20 nt, synthetic construct
  source 1..20: mol_type = other RNA
tccagttcctcgttgagctg

SEQ ID NO: 1809 - RNA, 20 nt, synthetic construct
  source 1..20: mol_type = other RNA
aggcagctcaacgaggaact

SEQ ID NO: 1810 - RNA, 20 nt, synthetic construct
  source 1..20: mol_type = other RNA
ctcgttgagctgcctgaatc

SEQ ID NO: 1811 - RNA, 20 nt, synthetic construct
  source 1..20: mol_type = other RNA
agctgcctgaatctccctga

SEQ ID NO: 1812 - RNA, 20 nt, synthetic construct
  source 1..20: mol_type = other RNA
gtccccaccatctccactct

SEQ ID NO: 1813 - RNA, 20 nt, synthetic construct
  source 1..20: mol_type = other RNA
tccccaccatctccactctg

SEQ ID NO: 1814 - RNA, 20 nt, synthetic construct
  source 1..20: mol_type = other RNA
ccagagcccatggggcagag

SEQ ID NO: 1815 - RNA, 20 nt, synthetic construct
  source 1..20: mol_type = other RNA
gccagagcccatggggcaga

SEQ ID NO: 1816 - RNA, 20 nt, synthetic construct
  source 1..20: mol_type = other RNA
cagcctcagagatttgccag

SEQ ID NO: 1817 - RNA, 20 nt, synthetic construct
  source 1..20: mol_type = other RNA
ggaggccgtggacagtgaat

SEQ ID NO: 1818 - RNA, 20 nt, synthetic construct
  source 1..20: mol_type = other RNA
actgtccacggcctcccaac

SEQ ID NO: 1819 - RNA, 20 nt, synthetic construct
  source 1..20: mol_type = other RNA
gctccatcagccactgacct

SEQ ID NO: 1820 - RNA, 20 nt, synthetic construct
  source 1..20: mol_type = other RNA
aggcatgctgggcaggtcag

SEQ ID NO: 1821 - RNA, 20 nt, synthetic construct
  source 1..20: mol_type = other RNA
ctcgggaggtcagggcaggt

SEQ ID NO: 1822 - RNA, 20 nt, synthetic construct
  source 1..20: mol_type = other RNA
gctcgggaggtcagggcagg

SEQ ID NO: 1823 - RNA, 20 nt, synthetic construct
  source 1..20: mol_type = other RNA
gagacctctccagctgccgg

SEQ ID NO: 1824 - RNA, 20 nt, synthetic construct
  source 1..20: mol_type = other RNA
ttggagacctctccagctgc

SEQ ID NO: 1825 - RNA, 20 nt, synthetic construct
  source 1..20: mol_type = other RNA
gaagcttgttggagacctct

SEQ ID NO: 1826 - RNA, 20 nt, synthetic construct
  source 1..20: mol_type = other RNA
ggaagcttgttggagacctc

SEQ ID NO: 1827 - RNA, 20 nt, synthetic construct
  source 1..20: mol_type = other RNA
tggaagcttgttggagacct

SEQ ID NO: 1828 - RNA, 20 nt, synthetic construct
  source 1..20: mol_type = other RNA
taccgctcactgcaggacac

SEQ ID NO: 1829 - RNA, 20 nt, synthetic construct
  source 1..20: mol_type = other RNA
ctgctgctcctctccagcct

SEQ ID NO: 1830 - RNA, 20 nt, synthetic construct
  source 1..20: mol_type = other RNA
ccgctccaggctcttgctgc

SEQ ID NO: 1831 - RNA, 20 nt, synthetic construct
  source 1..20: mol_type = other RNA
tgcccagtccggggtggcca

SEQ ID NO: 1832 - RNA, 20 nt, synthetic construct
  source 1..20: mol_type = other RNA
ggccagctgccgttctgccc

SEQ ID NO: 1833 - RNA, 20 nt, synthetic construct
  source 1..20: mol_type = other RNA
gcagccaacagcacctcagc

SEQ ID NO: 1834 - RNA, 20 nt, synthetic construct
  source 1..20: mol_type = other RNA
gctgccaaggagcaccggcg

SEQ ID NO: 1835 - RNA, 20 nt, synthetic construct
  source 1..20: mol_type = other RNA
cccagcacagcaatcactcg

SEQ ID NO: 1836 - RNA, 20 nt, synthetic construct
  source 1..20: mol_type = other RNA
gcccagcacagcaatcactc

SEQ ID NO: 1837 - RNA, 20 nt, synthetic construct
  source 1..20: mol_type = other RNA
ctgtgctgggcaaagctggt

SEQ ID NO: 1838 - RNA, 20 nt, synthetic construct
  source 1..20: mol_type = other RNA
ccctgaccagctttgcccag

SEQ ID NO: 1839 - RNA, 20 nt, synthetic construct
  source 1..20: mol_type = other RNA
ggctggggcagtgagccggg

SEQ ID NO: 1840 - RNA, 20 nt, synthetic construct
  source 1..20: mol_type = other RNA
tggccggcttccccagtacg

SEQ ID NO: 1841 - RNA, 20 nt, synthetic construct
  source 1..20: mol_type = other RNA
cccagtacgactttgtcttc

SEQ ID NO: 1842 - RNA, 20 nt, synthetic construct
  source 1..20: mol_type = other RNA
gtcttctctgtcccctgcca

SEQ ID NO: 1843 - RNA, 20 nt, synthetic construct
  source 1..20: mol_type = other RNA
tcttctctgtcccctgccat

SEQ ID NO: 1844 - RNA, 20 nt, synthetic construct
  source 1..20: mol_type = other RNA
tctgtcccctgccattgctt

SEQ ID NO: 1845 - RNA, 20 nt, synthetic construct
  source 1..20: mol_type = other RNA
aagcaatggcaggggacaga

SEQ ID NO: 1846 - RNA, 20 nt, synthetic construct
  source 1..20: mol_type = other RNA
cttgaaccgtccgggggatg

SEQ ID NO: 1847 - RNA, 20 nt, synthetic construct
  source 1..20: mol_type = other RNA
aaccgtccgggggatgccta

SEQ ID NO: 1848 - RNA, 20 nt, synthetic construct
  source 1..20: mol_type = other RNA
tccctgggcccacagccact

SEQ ID NO: 1849 - RNA, 20 nt, synthetic construct
  source 1..20: mol_type = other RNA
aagatgtggctgaaaacctc

SEQ ID NO: 1850 - RNA, 20 nt, synthetic construct
  source 1..20: mol_type = other RNA
tcagccacatcttgaagaga

SEQ ID NO: 1851 - RNA, 20 nt, synthetic construct
  source 1..20: mol_type = other RNA
cagccacatcttgaagagac

SEQ ID NO: 1852 - RNA, 20 nt, synthetic construct
  source 1..20: mol_type = other RNA
agccacatcttgaagagacc

SEQ ID NO: 1853 - RNA, 20 nt, synthetic construct
  source 1..20: mol_type = other RNA
aagagacctgaccgcgttct

SEQ ID NO: 1854 - RNA, 20 nt, synthetic construct
  source 1..20: mol_type = other RNA
tgctcatcctagacggcttc

SEQ ID NO: 1855 - RNA, 20 nt, synthetic construct
  source 1..20: mol_type = other RNA
cagctcctcgaagccgtcta

SEQ ID NO: 1856 - RNA, 20 nt, synthetic construct
  source 1..20: mol_type = other RNA
cgcttccagctcctcgaagc

SEQ ID NO: 1857 - RNA, 20 nt, synthetic construct
  source 1..20: mol_type = other RNA
gaggagctggaagcgcaaga

SEQ ID NO: 1858 - RNA, 20 nt, synthetic construct
  source 1..20: mol_type = other RNA
ctgcacagcacgtgcggacc

SEQ ID NO: 1859 - RNA, 20 nt, synthetic construct
  source 1..20: mol_type = other RNA
tggaaaaggccggccagcag

SEQ ID NO: 1860 - RNA, 20 nt, synthetic construct
  source 1..20: mol_type = other RNA
ttctggaaaaggccggccag

SEQ ID NO: 1861 - RNA, 20 nt, synthetic construct
  source 1..20: mol_type = other RNA
tccagaagaagctgctccga

SEQ ID NO: 1862 - RNA, 20 nt, synthetic construct
  source 1..20: mol_type = other RNA
ccagaagaagctgctccgag

SEQ ID NO: 1863 - RNA, 20 nt, synthetic construct
  source 1..20: mol_type = other RNA
cagaagaagctgctccgagg

SEQ ID NO: 1864 - RNA, 20 nt, synthetic construct
  source 1..20: mol_type = other RNA
caccctcctcctcacagccc

SEQ ID NO: 1865 - RNA, 20 nt, synthetic construct
  source 1..20: mol_type = other RNA
ctcaggctctggaccaggcg

SEQ ID NO: 1866 - RNA, 20 nt, synthetic construct
  source 1..20: mol_type = other RNA
gagctgtccggcttctccat

SEQ ID NO: 1867 - RNA, 20 nt, synthetic construct
  source 1..20: mol_type = other RNA
agctgtccggcttctccatg

SEQ ID NO: 1868 - RNA, 20 nt, synthetic construct
  source 1..20: mol_type = other RNA
tccatggagcaggcccaggc

SEQ ID NO: 1869 - RNA, 20 nt, synthetic construct
  source 1..20: mol_type = other RNA
gagagctcagggatgacaga

SEQ ID NO: 1870 - RNA, 20 nt, synthetic construct
  source 1..20: mol_type = other RNA
agagctcagggatgacagag

SEQ ID NO: 1871 - RNA, 20 nt, synthetic construct
  source 1..20: mol_type = other RNA
gtgctctgtcatccctgagc

SEQ ID NO: 1872 - RNA, 20 nt, synthetic construct
  source 1..20: mol_type = other RNA
ttctcagtcacagccacagc

SEQ ID NO: 1873 - RNA, 20 nt, synthetic construct
  source 1..20: mol_type = other RNA
tcagtcacagccacagccct

SEQ ID NO: 1874 - RNA, 20 nt, synthetic construct
  source 1..20: mol_type = other RNA
gtgccgggcagtgtgccagc

SEQ ID NO: 1875 - RNA, 20 nt, synthetic construct
  source 1..20: mol_type = other RNA
tgccgggcagtgtgccagct

SEQ ID NO: 1876 - RNA, 20 nt, synthetic construct
  source 1..20: mol_type = other RNA
gcgtcctccccaagctccag

SEQ ID NO: 1877 - RNA, 20 nt, synthetic construct
  source 1..20: mol_type = other RNA
gggaggacgccaagctgccc

SEQ ID NO: 1878 - RNA, 20 nt, synthetic construct
  source 1..20: mol_type = other RNA
gccagctctgccagggcccc

SEQ ID NO: 1879 - RNA, 20 nt, synthetic construct
  source 1..20: mol_type = other RNA
atgtctgcggcccagctccc

SEQ ID NO: 1880 - RNA, 20 nt, synthetic construct
  source 1..20: mol_type = other RNA
gatgtctgcggcccagctcc

SEQ ID NO: 1881 - RNA, 20 nt, synthetic construct
  source 1..20: mol_type = other RNA
ccatccgcagacgtgaggac

SEQ ID NO: 1882 - RNA, 20 nt, synthetic construct
  source 1..20: mol_type = other RNA
gccatcgcccaggtcctcac

SEQ ID NO: 1883 - RNA, 20 nt, synthetic construct
  source 1..20: mol_type = other RNA
ggccatcgcccaggtcctca

SEQ ID NO: 1884 - RNA, 20 nt, synthetic construct
  source 1..20: mol_type = other RNA
gactaagcctttggccatcg

SEQ ID NO: 1885 - RNA, 20 nt, synthetic construct
  source 1..20: mol_type = other RNA
gtccaacacccaccgcgggc

SEQ ID NO: 1886 - RNA, 20 nt, synthetic construct
  source 1..20: mol_type = other RNA
caggaggaagctggggaagg

SEQ ID NO: 1887 - RNA, 20 nt, synthetic construct
  source 1..20: mol_type = other RNA
cccagcttcctcctgcaatg

SEQ ID NO: 1888 - RNA, 20 nt, synthetic construct
  source 1..20: mol_type = other RNA
ctcctgcaatgcttcctggg

SEQ ID NO: 1889 - RNA, 20 nt, synthetic construct
  source 1..20: mol_type = other RNA
ctgggggccctgtggctggc

SEQ ID NO: 1890 - RNA, 20 nt, synthetic construct
  source 1..20: mol_type = other RNA
gccactcagagccagccaca

SEQ ID NO: 1891 - RNA, 20 nt, synthetic construct
  source 1..20: mol_type = other RNA
cgccactcagagccagccac

SEQ ID NO: 1892 - RNA, 20 nt, synthetic construct
  source 1..20: mol_type = other RNA
atttcgccactcagagccag

SEQ ID NO: 1893 - RNA, 20 nt, synthetic construct
  source 1..20: mol_type = other RNA
tccttgatttcgccactcag

SEQ ID NO: 1894 - RNA, 20 nt, synthetic construct
  source 1..20: mol_type = other RNA
gggtcaatgctaggtactgc

SEQ ID NO: 1895 - RNA, 20 nt, synthetic construct
  source 1..20: mol_type = other RNA
cttggggtcaatgctaggta

SEQ ID NO: 1896 - RNA, 20 nt, synthetic construct
  source 1..20: mol_type = other RNA
ttccttggggtcaatgctag

SEQ ID NO: 1897 - RNA, 20 nt, synthetic construct
  source 1..20: mol_type = other RNA
accccaaggaagaagaggcc

SEQ ID NO: 1898 - RNA, 20 nt, synthetic construct
  source 1..20: mol_type = other RNA
tcatagggcctcttcttcct

SEQ ID NO: 1899 - RNA, 20 nt, synthetic construct
  source 1..20: mol_type = other RNA
ctggctgggctgatcttcca

SEQ ID NO: 1900 - RNA, 20 nt, synthetic construct
  source 1..20: mol_type = other RNA
tggctgggctgatcttccag

SEQ ID NO: 1901 - RNA, 20 nt, synthetic construct
  source 1..20: mol_type = other RNA
cagcctcccgcccgctgcct

SEQ ID NO: 1902 - RNA, 20 nt, synthetic construct
  source 1..20: mol_type = other RNA
ctgtccaccgaggcagccgc

SEQ ID NO: 1903 - RNA, 20 nt, synthetic construct
  source 1..20: mol_type = other RNA
tgcttcctgtccaccgaggc

SEQ ID NO: 1904 - RNA, 20 nt, synthetic construct
  source 1..20: mol_type = other RNA
aggtacctcgcaagcacctt

SEQ ID NO: 1905 - RNA, 20 nt, synthetic construct
  source 1..20: mol_type = other RNA
cgaggtacctgaagcggctg

SEQ ID NO: 1906 - RNA, 20 nt, synthetic construct
  source 1..20: mol_type = other RNA
cagcctcctcggcctcgtgg

SEQ ID NO: 1907 - RNA, 20 nt, synthetic construct
  source 1..20: mol_type = other RNA
ggcagcacgtggtacaggag

SEQ ID NO: 1908 - RNA, 20 nt, synthetic construct
  source 1..20: mol_type = other RNA
gcagcacgtggtacaggagc

SEQ ID NO: 1909 - RNA, 20 nt, synthetic construct
  source 1..20: mol_type = other RNA
tctgggcacccgcctcacgc

SEQ ID NO: 1910 - RNA, 20 nt, synthetic construct
  source 1..20: mol_type = other RNA
ctgggcacccgcctcacgcc

SEQ ID NO: 1911 - RNA, 20 nt, synthetic construct
  source 1..20: mol_type = other RNA
tgggcacccgcctcacgcct

SEQ ID NO: 1912 - RNA, 20 nt, synthetic construct
  source 1..20: mol_type = other RNA
cccagtacatgtgcatcagg

SEQ ID NO: 1913 - RNA, 20 nt, synthetic construct
  source 1..20: mol_type = other RNA
gcccgccgcctccaaggcct

SEQ ID NO: 1914 - RNA, 20 nt, synthetic construct
  source 1..20: mol_type = other RNA
gaggcggcgggccaagactt

SEQ ID NO: 1915 - RNA, 20 nt, synthetic construct
  source 1..20: mol_type = other RNA
tccctggacctccgcagcac

SEQ ID NO: 1916 - RNA, 20 nt, synthetic construct
  source 1..20: mol_type = other RNA
gcccctctggattggggagc

SEQ ID NO: 1917 - RNA, 20 nt, synthetic construct
  source 1..20: mol_type = other RNA
cccctctggattggggagcc

SEQ ID NO: 1918 - RNA, 20 nt, synthetic construct
  source 1..20: mol_type = other RNA
gggagcctcgtgggactcag

SEQ ID NO: 1919 - RNA, 20 nt, synthetic construct
  source 1..20: mol_type = other RNA
gtctccccatgctgctgcag

SEQ ID NO: 1920 - RNA, 20 nt, synthetic construct
  source 1..20: mol_type = other RNA
tcctctgctgcctgaagtag

SEQ ID NO: 1921 - RNA, 20 nt, synthetic construct
  source 1..20: mol_type = other RNA
aggcagcagaggagaagttc

SEQ ID NO: 1922 - RNA, 20 nt, synthetic construct
  source 1..20: mol_type = other RNA
aaaggctcgatggtgaactt

SEQ ID NO: 1923 - RNA, 20 nt, synthetic construct
  source 1..20: mol_type = other RNA
gaaaggctcgatggtgaact

SEQ ID NO: 1924 - RNA, 20 nt, synthetic construct
  source 1..20: mol_type = other RNA
accatcgagcctttcaaagc

SEQ ID NO: 1925 - RNA, 20 nt, synthetic construct
  source 1..20: mol_type = other RNA
gctttgaaaggctcgatggt

SEQ ID NO: 1926 - RNA, 20 nt, synthetic construct
  source 1..20: mol_type = other RNA
agggacttggctttgaaagg

SEQ ID NO: 1927 - RNA, 20 nt, synthetic construct
  source 1..20: mol_type = other RNA
caaagccaagtccctgaagg

SEQ ID NO: 1928 - RNA, 20 nt, synthetic construct
  source 1..20: mol_type = other RNA
aaagccaagtccctgaagga

SEQ ID NO: 1929 - RNA, 20 nt, synthetic construct
  source 1..20: mol_type = other RNA
cacatccttcagggacttgg

SEQ ID NO: 1930 - RNA, 20 nt, synthetic construct
  source 1..20: mol_type = other RNA
ccaggtcttccacatccttc

SEQ ID NO: 1931 - RNA, 20 nt, synthetic construct
  source 1..20: mol_type = other RNA
cccaggtcttccacatcctt

SEQ ID NO: 1932 - RNA, 20 nt, synthetic construct
  source 1..20: mol_type = other RNA
ctcggaagacacagctgggg

SEQ ID NO: 1933 - RNA, 20 nt, synthetic construct
  source 1..20: mol_type = other RNA
ggtcccgaacagcagggagc

SEQ ID NO: 1934 - RNA, 20 nt, synthetic construct
  source 1..20: mol_type = other RNA
aggtcccgaacagcagggag

SEQ ID NO: 1935 - RNA, 20 nt, synthetic construct
  source 1..20: mol_type = other RNA
tttaggtcccgaacagcagg

SEQ ID NO: 1936 - RNA, 20 nt, synthetic construct
  source 1..20: mol_type = other RNA
ctttaggtcccgaacagcag

SEQ ID NO: 1937 - RNA, 20 nt, synthetic construct
  source 1..20: mol_type = other RNA
gggacctaaagaaactggag

SEQ ID NO: 1938 - RNA, 20 nt, synthetic construct
  source 1..20: mol_type = other RNA
gggaaagcctgggggcctga

SEQ ID NO: 1939 - RNA, 20 nt, synthetic construct
  source 1..20: mol_type = other RNA
ggggaaagcctgggggcctg

SEQ ID NO: 1940 - RNA, 20 nt, synthetic construct
  source 1..20: mol_type = other RNA
ccccaaactggtgcggatcc

SEQ ID NO: 1941 - RNA, 20 nt, synthetic construct
  source 1..20: mol_type = other RNA
cccaaactggtgcggatcct

SEQ ID NO: 1942 - RNA, 20 nt, synthetic construct
  source 1..20: mol_type = other RNA
ttctcactcagcgcatccag

SEQ ID NO: 1943 - RNA, 20 nt, synthetic construct
  source 1..20: mol_type = other RNA
agctgggggaaggtggctga

SEQ ID NO: 1944 - RNA, 20 nt, synthetic construct
  source 1..20: mol_type = other RNA
ccccagctgaagtccttgga

SEQ ID NO: 1945 - RNA, 20 nt, synthetic construct
  source 1..20: mol_type = other RNA
caaggacttcagctggggga

SEQ ID NO: 1946 - RNA, 20 nt, synthetic construct
  source 1..20: mol_type = other RNA
ccaaggacttcagctggggg

SEQ ID NO: 1947 - RNA, 20 nt, synthetic construct
  source 1..20: mol_type = other RNA
agggtttccaaggacttcag

SEQ ID NO: 1948 - RNA, 20 nt, synthetic construct
  source 1..20: mol_type = other RNA
taggcacccaggtcagtgat

SEQ ID NO: 1949 - RNA, 20 nt, synthetic construct
  source 1..20: mol_type = other RNA
gtaggcacccaggtcagtga

SEQ ID NO: 1950 - RNA, 20 nt, synthetic construct
  source 1..20: mol_type = other RNA
gctcgctgcatccctgctca

SEQ ID NO: 1951 - RNA, 20 nt, synthetic construct
  source 1..20: mol_type = other RNA
gcctgagcagggatgcagcg

SEQ ID NO: 1952 - RNA, 20 nt, synthetic construct
  source 1..20: mol_type = other RNA
tacaataactgcatctgcga

SEQ ID NO: 1953 - RNA, 20 nt, synthetic construct
  source 1..20: mol_type = other RNA
gctcgtgtgcttccggacat

SEQ ID NO: 1954 - RNA, 20 nt, synthetic construct
  source 1..20: mol_type = other RNA
cggacatggtgtccctccgg

SEQ ID NO: 1955 - RNA, 20 nt, synthetic construct
  source 1..20: mol_type = other RNA
acggctgccggggcccagca

SEQ ID NO: 1956 - RNA, 20 nt, synthetic construct
  source 1..20: mol_type = other RNA
ggaggtgtcctcatgtggag

SEQ ID NO: 1957 - RNA, 20 nt, synthetic construct
  source 1..20: mol_type = other RNA
ctggacactgaatgggatgg

SEQ ID NO: 1958 - RNA, 20 nt, synthetic construct
  source 1..20: mol_type = other RNA
agtgtccaggaacacctgca

SEQ ID NO: 1959 - RNA, 20 nt, synthetic construct
  source 1..20: mol_type = other RNA
caggtgttcctggacactga

SEQ ID NO: 1960 - RNA, 20 nt, synthetic construct
  source 1..20: mol_type = other RNA
ttgcaggtgttcctggacac

SEQ ID NO: 1961 - RNA, 20 nt, synthetic construct
  source 1..20: mol_type = other RNA
acggatcagcctgagatgat

SEQ ID NO: 1962 - RNA, 20 nt, synthetic construct
  source 1..20: mol_type = other RNA
tcacaaagtaaggattctga

SEQ ID NO: 1963 - RNA, 20 nt, synthetic construct
  source 1..20: mol_type = other RNA
tggacttcaagagcaacagt

SEQ ID NO: 1964 - RNA, 20 nt, synthetic construct
  source 1..20: mol_type = other RNA
attctcaaacaaatgtgtca

SEQ ID NO: 1965 - RNA, 20 nt, synthetic construct
  source 1..20: mol_type = other RNA
actttgcatgtgcaaacgcc

SEQ ID NO: 1966 - RNA, 20 nt, synthetic construct
  source 1..20: mol_type = other RNA
caaacgccttcaacaacagc

SEQ ID NO: 1967 - RNA, 20 nt, synthetic construct
  source 1..20: mol_type = other RNA
tatatcacagacaaaactgt

SEQ ID NO: 1968 - RNA, 20 nt, synthetic construct
  source 1..20: mol_type = other RNA
aatccagtgacaagtctgtc

SEQ ID NO: 1969 - RNA, 20 nt, synthetic construct
  source 1..20: mol_type = other RNA
atgtgtatatcacagacaaa

SEQ ID NO: 1970 - RNA, 20 nt, synthetic construct
  source 1..20: mol_type = other RNA
catgtgcaaacgccttcaac

SEQ ID NO: 1971 - RNA, 20 nt, synthetic construct
  source 1..20: mol_type = other RNA
tcacagacaaaactgtgcta

SEQ ID NO: 1972 - RNA, 20 nt, synthetic construct
  source 1..20: mol_type = other RNA
tatcacagacaaaactgtgc

SEQ ID NO: 1973 - RNA, 20 nt, synthetic construct
  source 1..20: mol_type = other RNA
tctgcctattcaccgatttt

SEQ ID NO: 1974 - RNA, 20 nt, synthetic construct
  source 1..20: mol_type = other RNA
gcctggagcaacaaatctga

SEQ ID NO: 1975 - RNA, 20 nt, synthetic construct
  source 1..20: mol_type = other RNA
ccagctgagagactctaaat

SEQ ID NO: 1976 - RNA, 20 nt, synthetic construct
  source 1..20: mol_type = other RNA
cctattcaccgattttgatt

SEQ ID NO: 1977 - RNA, 20 nt, synthetic construct
  source 1..20: mol_type = other RNA
ctagacatgaggtctatgga

SEQ ID NO: 1978 - RNA, 20 nt, synthetic construct
  source 1..20: mol_type = other RNA
gacttcaagagcaacagtgc

SEQ ID NO: 1979 - RNA, 20 nt, synthetic construct
  source 1..20: mol_type = other RNA
gcacagttttgtctgtgata

SEQ ID NO: 1980 - RNA, 20 nt, synthetic construct
  source 1..20: mol_type = other RNA
agaatcaaaatcggtgaata

SEQ ID NO: 1981 - RNA, 20 nt, synthetic construct
  source 1..20: mol_type = other RNA
cacatcagaatccttacttt

SEQ ID NO: 1982 - RNA, 20 nt, synthetic construct
  source 1..20: mol_type = other RNA
tgatatacacatcagaatcc

SEQ ID NO: 1983 - RNA, 20 nt, synthetic construct
  source 1..20: mol_type = other RNA
acacatttgtttgagaatca

SEQ ID NO: 1984 - RNA, 20 nt, synthetic construct
  source 1..20: mol_type = other RNA
tgacacatttgtttgagaat

SEQ ID NO: 1985 - RNA, 20 nt, synthetic construct
  source 1..20: mol_type = other RNA
gagtctctcagctggtacac

SEQ ID NO: 1986 - RNA, 20 nt, synthetic construct
  source 1..20: mol_type = other RNA
ttgctccaggccacagcact

SEQ ID NO: 1987 - RNA, 20 nt, synthetic construct
  source 1..20: mol_type = other RNA
cacatgcaaagtcagatttg

SEQ ID NO: 1988 - RNA, 20 nt, synthetic construct
  source 1..20: mol_type = other RNA
tttgagaatcaaaatcggtg

SEQ ID NO: 1989 - RNA, 20 nt, synthetic construct
  source 1..20: mol_type = other RNA
atatacacatcagaatcctt

SEQ ID NO: 1990 - RNA, 20 nt, synthetic construct
  source 1..20: mol_type = other RNA
gaataatgctgttgttgaag

SEQ ID NO: 1991 - RNA, 20 nt, synthetic construct
  source 1..20: mol_type = other RNA
tctgtgatatacacatcaga

SEQ ID NO: 1992 - RNA, 20 nt, synthetic construct
  source 1..20: mol_type = other RNA
atgtcaagctggtcgagaaa

SEQ ID NO: 1993 - RNA, 20 nt, synthetic construct
  source 1..20: mol_type = other RNA
ctcatgacgctgcggctgtg

SEQ ID NO: 1994 - RNA, 20 nt, synthetic construct
  source 1..20: mol_type = other RNA
atctgctcatgacgctgcgg

SEQ ID NO: 1995 - RNA, 20 nt, synthetic construct
  source 1..20: mol_type = other RNA
ctccctcgctccttcctctg

SEQ ID NO: 1996 - RNA, 20 nt, synthetic construct
  source 1..20: mol_type = other RNA
ggcgtgttgtatgtcctgct

SEQ ID NO: 1997 - RNA, 20 nt, synthetic construct
  source 1..20: mol_type = other RNA
cacattccctcctgctcccc

SEQ ID NO: 1998 - RNA, 20 nt, synthetic construct
  source 1..20: mol_type = other RNA
caagattgtaagacagcctg

SEQ ID NO: 1999 - RNA, 20 nt, synthetic construct
  source 1..20: mol_type = other RNA
cattgcccctcttctccctc

SEQ ID NO: 2000 - RNA, 20 nt, synthetic construct
  source 1..20: mol_type = other RNA
tatctgggcgtgttgtatgt

SEQ ID NO: 2001 - RNA, 20 nt, synthetic construct
  source 1..20: mol_type = other RNA
tgtcctgctgccgatgcctt

SEQ ID NO: 2002 - RNA, 20 nt, synthetic construct
  source 1..20: mol_type = other RNA
agacagcctgtgctccctcg

SEQ ID NO: 2003 - RNA, 20 nt, synthetic construct
  source 1..20: mol_type = other RNA
ttcccttattgctgcttgtc

SEQ ID NO: 2004 - RNA, 20 nt, synthetic construct
  source 1..20: mol_type = other RNA
attaagattgctgaagagct

SEQ ID NO: 2005 - RNA, 20 nt, synthetic construct
  source 1..20: mol_type = other RNA
cccccccggcaatgccacca

SEQ ID NO: 2006 - RNA, 20 nt, synthetic construct
  source 1..20: mol_type = other RNA
tctgggcgtgttgtatgtcc

SEQ ID NO: 2007 - RNA, 20 nt, synthetic construct
  source 1..20: mol_type = other RNA
tgattaagattgctgaagag

SEQ ID NO: 2008 - RNA, 20 nt, synthetic construct
  source 1..20: mol_type = other RNA
ggtcctgcagaatgttgtga

SEQ ID NO: 2009 - RNA, 20 nt, synthetic construct
  source 1..20: mol_type = other RNA
tgcccccccggcaatgccac

SEQ ID NO: 2010 - RNA, 20 nt, synthetic construct
  source 1..20: mol_type = other RNA
ctgtgtatctgggcgtgttg

SEQ ID NO: 2011 - RNA, 20 nt, synthetic construct
  source 1..20: mol_type = other RNA
tttggagagggagaagaggg

SEQ ID NO: 2012 - RNA, 20 nt, synthetic construct
  source 1..20: mol_type = other RNA
caggacctagagcccaagag

SEQ ID NO: 2013 - RNA, 20 nt, synthetic construct
  source 1..20: mol_type = other RNA
ccgtgaatgtcaggcagtga

SEQ ID NO: 2014 - RNA, 20 nt, synthetic construct
  source 1..20: mol_type = other RNA
gagagggagaagaggggcaa

SEQ ID NO: 2015 - RNA, 20 nt, synthetic construct
  source 1..20: mol_type = other RNA
gggagcaggagggaatgtgc

SEQ ID NO: 2016 - RNA, 20 nt, synthetic construct
  source 1..20: mol_type = other RNA
cacagccaggggaggctgca

SEQ ID NO: 2017 - RNA, 20 nt, synthetic construct
  source 1..20: mol_type = other RNA
ggatggcggaggcagtctct

SEQ ID NO: 2018 - RNA, 20 nt, synthetic construct
  source 1..20: mol_type = other RNA
tgggatggcggaggcagtct

SEQ ID NO: 2019 - RNA, 20 nt, synthetic construct
  source 1..20: mol_type = other RNA
gcagctcttcagcaatctta

SEQ ID NO: 2020 - RNA, 20 nt, synthetic construct
  source 1..20: mol_type = other RNA
tggatatctgtgggacaaga

SEQ ID NO: 2021 - RNA, 20 nt, synthetic construct
  source 1..20: mol_type = other RNA
tcccacagatatccagaacc

SEQ ID NO: 2022 - RNA, 20 nt, synthetic construct
  source 1..20: mol_type = other RNA
agagtctctcagctggtaca

SEQ ID NO: 2023 - RNA, 20 nt, synthetic construct
  source 1..20: mol_type = other RNA
tcactggatttagagtctct

SEQ ID NO: 2024 - RNA, 20 nt, synthetic construct
  source 1..20: mol_type = other RNA
agaatcaaaatcggtgaata

SEQ ID NO: 2025 - RNA, 20 nt, synthetic construct
  source 1..20: mol_type = other RNA
gagaatcaaaatcggtgaat

SEQ ID NO: 2026 - RNA, 20 nt, synthetic construct
  source 1..20: mol_type = other RNA
accgattttgattctcaaac

SEQ ID NO: 2027 - RNA, 20 nt, synthetic construct
  source 1..20: mol_type = other RNA
tttgagaatcaaaatcggtg

SEQ ID NO: 2028 - RNA, 20 nt, synthetic construct
  source 1..20: mol_type = other RNA
gtttgagaatcaaaatcggt

SEQ ID NO: 2029 - RNA, 20 nt, synthetic construct
  source 1..20: mol_type = other RNA
tgattctcaaacaaatgtgt

SEQ ID NO: 2030 - RNA, 20 nt, synthetic construct
  source 1..20: mol_type = other RNA
gattctcaaacaaatgtgtc

SEQ ID NO: 2031 - RNA, 20 nt, synthetic construct
  source 1..20: mol_type = other RNA
tgacacatttgtttgagaat

SEQ ID NO: 2032 - RNA, 20 nt, synthetic construct
  source 1..20: mol_type = other RNA
tcaaacaaatgtgtcacaaa

SEQ ID NO: 2033 - RNA, 20 nt, synthetic construct
  source 1..20: mol_type = other RNA
gtgacacatttgtttgagaa

SEQ ID NO: 2034 - RNA, 20 nt, synthetic construct
  source 1..20: mol_type = other RNA
ctttgtgacacatttgtttg

SEQ ID NO: 2035 - RNA, 20 nt, synthetic construct
  source 1..20: mol_type = other RNA
tgatgtgtatatcacagaca

SEQ ID NO: 2036 - RNA, 20 nt, synthetic construct
  source 1..20: mol_type = other RNA
gtctgtgatatacacatcag

SEQ ID NO: 2037 - RNA, 20 nt, synthetic construct
  source 1..20: mol_type = other RNA
tgtctgtgatatacacatca

SEQ ID NO: 2038 - RNA, 20 nt, synthetic construct
  source 1..20: mol_type = other RNA
aagtccatagacctcatgtc

SEQ ID NO: 2039 - RNA, 20 nt, synthetic construct
  source 1..20: mol_type = other RNA
ctcttgaagtccatagacct

SEQ ID NO: 2040 - RNA, 20 nt, synthetic construct
  source 1..20: mol_type = other RNA
aagagcaacagtgctgtggc

SEQ ID NO: 2041 - RNA, 20 nt, synthetic construct
  source 1..20: mol_type = other RNA
ctccaggccacagcactgtt

SEQ ID NO: 2042 - RNA, 20 nt, synthetic construct
  source 1..20: mol_type = other RNA
gttgctccaggccacagcac

SEQ ID NO: 2043 - RNA, 20 nt, synthetic construct
  source 1..20: mol_type = other RNA
gcacatgcaaagtcagattt

SEQ ID NO: 2044 - RNA, 20 nt, synthetic construct
  source 1..20: mol_type = other RNA
gcatgtgcaaacgccttcaa

SEQ ID NO: 2045 - RNA, 20 nt, synthetic construct
  source 1..20: mol_type = other RNA
aaggcgtttgcacatgcaaa

SEQ ID NO: 2046 - RNA, 20 nt, synthetic construct
  source 1..20: mol_type = other RNA
ttgaaggcgtttgcacatgc

SEQ ID NO: 2047 - RNA, 20 nt, synthetic construct
  source 1..20: mol_type = other RNA
aacaacagcattattccaga

SEQ ID NO: 2048 - RNA, 20 nt, synthetic construct
  source 1..20: mol_type = other RNA
tggaataatgctgttgttga

SEQ ID NO: 2049 - RNA, 20 nt, synthetic construct
  source 1..20: mol_type = other RNA
ttccagaagacaccttcttc

SEQ ID NO: 2050 - RNA, 20 nt, synthetic construct
  source 1..20: mol_type = other RNA
cagaagacaccttcttcccc

SEQ ID NO: 2051 - RNA, 20 nt, synthetic construct
  source 1..20: mol_type = other RNA
cctgggctggggaagaaggt

SEQ ID NO: 2052 - RNA, 20 nt, synthetic construct
  source 1..20: mol_type = other RNA
ttccccagcccaggtaaggg

SEQ ID NO: 2053 - RNA, 20 nt, synthetic construct
  source 1..20: mol_type = other RNA
cccagcccaggtaagggcag

SEQ ID NO: 2054 - RNA, 20 nt, synthetic construct
  source 1..20: mol_type = other RNA
taaaaggaaaaacagacatt

SEQ ID NO: 2055 - RNA, 20 nt, synthetic construct
  source 1..20: mol_type = other RNA
ctaaaaggaaaaacagacat

SEQ ID NO: 2056 - RNA, 20 nt, synthetic construct
  source 1..20: mol_type = other RNA
ttccttttagaaagttcctg

SEQ ID NO: 2057 - RNA, 20 nt, synthetic construct
  source 1..20: mol_type = other RNA
tccttttagaaagttcctgt

SEQ ID NO: 2058 - RNA, 20 nt, synthetic construct
  source 1..20: mol_type = other RNA
ccttttagaaagttcctgtg

SEQ ID NO: 2059 - RNA, 20 nt, synthetic construct
  source 1..20: mol_type = other RNA
cttttagaaagttcctgtga

SEQ ID NO: 2060 - RNA, 20 nt, synthetic construct
  source 1..20: mol_type = other RNA
tagaaagttcctgtgatgtc

SEQ ID NO: 2061 - RNA, 20 nt, synthetic construct
  source 1..20: mol_type = other RNA
agaaagttcctgtgatgtca

SEQ ID NO: 2062 - RNA, 20 nt, synthetic construct
  source 1..20: mol_type = other RNA
gaaagttcctgtgatgtcaa

SEQ ID NO: 2063 - RNA, 20 nt, synthetic construct
  source 1..20: mol_type = other RNA
acatcacaggaactttctaa

SEQ ID NO: 2064 - RNA, 20 nt, synthetic construct
  source 1..20: mol_type = other RNA
ctgtgatgtcaagctggtcg

SEQ ID NO: 2065 - RNA, 20 nt, synthetic construct
  source 1..20: mol_type = other RNA
tcgaccagcttgacatcaca

SEQ ID NO: 2066 - RNA, 20 nt, synthetic construct
  source 1..20: mol_type = other RNA
ctcgaccagcttgacatcac

SEQ ID NO: 2067 - RNA, 20 nt, synthetic construct
  source 1..20: mol_type = other RNA
tctcgaccagcttgacatca

SEQ ID NO: 2068 - RNA, 20 nt, synthetic construct
  source 1..20: mol_type = other RNA
aaagcttttctcgaccagct

SEQ ID NO: 2069 - RNA, 20 nt, synthetic construct
  source 1..20: mol_type = other RNA
caaagcttttctcgaccagc

SEQ ID NO: 2070 - RNA, 20 nt, synthetic construct
  source 1..20: mol_type = other RNA
cctgtttcaaagcttttctc

SEQ ID NO: 2071 - RNA, 20 nt, synthetic construct
  source 1..20: mol_type = other RNA
gaaacaggtaagacaggggt

SEQ ID NO: 2072 - RNA, 20 nt, synthetic construct
  source 1..20: mol_type = other RNA
aaacaggtaagacaggggtc

SEQ ID NO: 2073 - RNA, 36 nt, synthetic construct
  source 1..36: mol_type = other RNA
ggagagatctcaaacgattgctcgattagtcgagac

SEQ ID NO: 2074 - RNA, 36 nt, synthetic construct
  source 1..36: mol_type = other RNA
gtcggaacgctcaacgattgcccctcacgaggggac

SEQ ID NO: 2075 - RNA, 36 nt, synthetic construct
  source 1..36: mol_type = other RNA
accaaaacgactattgattgcccagtacgctgggac

SEQ ID NO: 2076 - RNA, 37 nt, synthetic construct
  source 1..37: mol_type = other RNA
ggatccaatcctttttgattgcccaattcgttgggac

SEQ ID NO: 2077 - RNA, 36 nt, synthetic construct
  source 1..36: mol_type = other RNA
ggatctgaggatcattattgctcgttacgacgagac

SEQ ID NO: 2078 - RNA, 36 nt, synthetic construct
  source 1..36: mol_type = other RNA
cctgcgaaaccttttgattgctcagtacgctgagac

SEQ ID NO: 2079 - RNA, 36 nt, synthetic construct
  source 1..36: mol_type = other RNA
ctttcaagactaatagattgctccttacgaggagac

SEQ ID NO: 2080 - RNA, 36 nt, synthetic construct
  source 1..36: mol_type = other RNA
gtagaagacctcgctgattgctcggtgcgccgagac

SEQ ID NO: 2081 - RNA, 36 nt, synthetic construct
  source 1..36: mol_type = other RNA
atggcaacagactctcattgcgcggtacgccgcgac

SEQ ID NO: 2082 - RNA, 34 nt, synthetic construct
  source 1..34: mol_type = other RNA
gtcgctctctaacgcttgcccagtacgctgggac

SEQ ID NO: 2083 - RNA, 36 nt, synthetic construct
  source 1..36: mol_type = other RNA
gctggaagactcaatgatggctccttacgaggagac

SEQ ID NO: 2084 - RNA, 37 nt, synthetic construct
  source 1..37: mol_type = other RNA
ggttgaaccctcaacagattgctcggtaagccgagac

SEQ ID NO: 2085 - RNA, 36 nt, synthetic construct
  source 1..36: mol_type = other RNA
cttgaaatcctgtcagattgctcccttcggggagac

SEQ ID NO: 2086 - RNA, 36 nt, synthetic construct
  source 1..36: mol_type = other RNA
ctaggaacgcacgcagattgctcggtacgccgagac

SEQ ID NO: 2087 - RNA, 36 nt, synthetic construct
  source 1..36: mol_type = other RNA
attgcaacgcctaaagattgctcgatacgtcgagac

SEQ ID NO: 2088 - RNA, 36 nt, synthetic construct
  source 1..36: mol_type = other RNA
gttcggcraycctttgattgctcagtacgctgagac

SEQ ID NO: 2089 - RNA, 36 nt, synthetic construct
  source 1..36: mol_type = other RNA
gttgaacctagatcagatggctcagtacgctgagac

SEQ ID NO: 2090 - RNA, 36 nt, synthetic construct
  source 1..36: mol_type = other RNA
ccctcaacacgtcagaaatgcccggcacgccgggac

SEQ ID NO: 2091 - RNA, 36 nt, synthetic construct
  source 1..36: mol_type = other RNA
gtcgcaagactcgaataattgcccctctatggggac

SEQ ID NO: 2092 - RNA, 37 nt, synthetic construct
  source 1..37: mol_type = other RNA
gctggggaccgatcctgattgctcgctgcggcgagac

SEQ ID NO: 2093 - RNA, 36 nt, synthetic construct
  source 1..36: mol_type = other RNA
ctctcaatggataacgattgctctctacggagagac

SEQ ID NO: 2094 - RNA, 36 nt, synthetic construct
  source 1..36: mol_type = other RNA
gttgaaccctcaacagattgctcggtaagccgagac

SEQ ID NO: 2095 - RNA, 36 nt, synthetic construct
  source 1..36: mol_type = other RNA
actgaaaccaccaacgattgcgctcctcggagcgac

SEQ ID NO: 2096 - RNA, 56 nt, synthetic construct
  source 1..56: mol_type = other RNA
ctttcaagactaatagattgctccttacgaggagactggatatctgtgggacaaga

SEQ ID NO: 2097 - RNA, 56 nt, synthetic construct
  source 1..56: mol_type = other RNA
ctttcaagactaatagattgctccttacgaggagactcccacagatatccagaacc

SEQ ID NO: 2098 - RNA, 56 nt, synthetic construct; identical to SEQ ID NO: 1382
  source 1..56: mol_type = other RNA

SEQ ID NO: 2099 - RNA, 56 nt, synthetic construct
  source 1..56: mol_type = other RNA
ctttcaagactaatagattgctccttacgaggagacagagtctctcagctggtaca

SEQ ID NO: 2100 - RNA, 56 nt, synthetic construct
  source 1..56: mol_type = other RNA
ctttcaagactaatagattgctccttacgaggagactcactggatttagagtctct

SEQ ID NO: 2101 - RNA, 56 nt, synthetic construct
  source 1..56: mol_type = other RNA
ctttcaagactaatagattgctccttacgaggagacagaatcaaaatcggtgaata

SEQ ID NO: 2102 - RNA, 56 nt, synthetic construct
  source 1..56: mol_type = other RNA
ctttcaagactaatagattgctccttacgaggagacgagaatcaaaatcggtgaat

SEQ ID NO: 2103 - RNA, 56 nt, synthetic construct
  source 1..56: mol_type = other RNA
ctttcaagactaatagattgctccttacgaggagacaccgattttgattctcaaac

SEQ ID NO: 2104 - RNA, 56 nt, synthetic construct
  source 1..56: mol_type = other RNA
ctttcaagactaatagattgctccttacgaggagactttgagaatcaaaatcggtg

SEQ ID NO: 2105 - RNA, 56 nt, synthetic construct
  source 1..56: mol_type = other RNA
ctttcaagactaatagattgctccttacgaggagacgtttgagaatcaaaatcggt

SEQ ID NO: 2106 - RNA, 56 nt, synthetic construct
  source 1..56: mol_type = other RNA
ctttcaagactaatagattgctccttacgaggagactgattctcaaacaaatgtgt

SEQ ID NO: 2107 - RNA, 56 nt, synthetic construct
  source 1..56: mol_type = other RNA
ctttcaagactaatagattgctccttacgaggagacgattctcaaacaaatgtgtc

SEQ ID NO: 2108 - RNA, 56 nt, synthetic construct
  source 1..56: mol_type = other RNA
ctttcaagactaatagattgctccttacgaggagacattctcaaacaaatgtgtca

SEQ ID NO: 2109 - RNA, 56 nt, synthetic construct
  source 1..56: mol_type = other RNA
ctttcaagactaatagattgctccttacgaggagactgacacatttgtttgagaat

SEQ ID NO: 2110 - RNA, 56 nt, synthetic construct
  source 1..56: mol_type = other RNA
ctttcaagactaatagattgctccttacgaggagactcaaacaaatgtgtcacaaa

SEQ ID NO: 2111 - RNA, 56 nt, synthetic construct
  source 1..56: mol_type = other RNA
ctttcaagactaatagattgctccttacgaggagacgtgacacatttgtttgagaa

SEQ ID NO: 2112 - RNA, 56 nt, synthetic construct
  source 1..56: mol_type = other RNA
ctttcaagactaatagattgctccttacgaggagacctttgtgacacatttgtttg

SEQ ID NO: 2113 - RNA, 56 nt, synthetic construct
  source 1..56: mol_type = other RNA
ctttcaagactaatagattgctccttacgaggagactgatgtgtatatcacagaca

SEQ ID NO: 2114 - RNA, 56 nt, synthetic construct
  source 1..56: mol_type = other RNA
ctttcaagactaatagattgctccttacgaggagactctgtgatatacacatcaga

SEQ ID NO: 2115 - RNA, 56 nt, synthetic construct
  source 1..56: mol_type = other RNA
ctttcaagactaatagattgctccttacgaggagacgtctgtgatatacacatcag

SEQ ID NO: 2116 - RNA, 56 nt, synthetic construct
  source 1..56: mol_type = other RNA
ctttcaagactaatagattgctccttacgaggagactgtctgtgatatacacatca

SEQ ID NO: 2117 - RNA, 56 nt, synthetic construct
  source 1..56: mol_type = other RNA
ctttcaagactaatagattgctccttacgaggagacaagtccatagacctcatgtc

SEQ ID NO: 2118 - RNA, 56 nt, synthetic construct
  source 1..56: mol_type = other RNA
ctttcaagactaatagattgctccttacgaggagacctcttgaagtccatagacct

SEQ ID NO: 2119 - RNA, 56 nt, synthetic construct
  source 1..56: mol_type = other RNA
ctttcaagactaatagattgctccttacgaggagacaagagcaacagtgctgtggc

SEQ ID NO: 2120 - RNA, 56 nt, synthetic construct
  source 1..56: mol_type = other RNA
ctttcaagactaatagattgctccttacgaggagacctccaggccacagcactgtt

SEQ ID NO: 2121 - RNA, 56 nt, synthetic construct
  source 1..56: mol_type = other RNA
ctttcaagactaatagattgctccttacgaggagacttgctccaggccacagcact

SEQ ID NO: 2122 - RNA, 56 nt, synthetic construct
  source 1..56: mol_type = other RNA
ctttcaagactaatagattgctccttacgaggagacgttgctccaggccacagcac

SEQ ID NO: 2123 - RNA, 56 nt, synthetic construct
  source 1..56: mol_type = other RNA
ctttcaagactaatagattgctccttacgaggagaccacatgcaaagtcagatttg

SEQ ID NO: 2124 - RNA, 56 nt, synthetic construct
  source 1..56: mol_type = other RNA
ctttcaagactaatagattgctccttacgaggagacgcacatgcaaagtcagattt

SEQ ID NO: 2125 - RNA, 56 nt, synthetic construct
  source 1..56: mol_type = other RNA
ctttcaagactaatagattgctccttacgaggagacgcatgtgcaaacgccttcaa

SEQ ID NO: 2126 - RNA, 56 nt, synthetic construct
  source 1..56: mol_type = other RNA
ctttcaagactaatagattgctccttacgaggagacaaggcgtttgcacatgcaaa

SEQ ID NO: 2127 - RNA, 56 nt, synthetic construct
  source 1..56: mol_type = other RNA
ctttcaagactaatagattgctccttacgaggagaccatgtgcaaacgccttcaac

SEQ ID NO: 2128 - RNA, 56 nt, synthetic construct
  source 1..56: mol_type = other RNA
ctttcaagactaatagattgctccttacgaggagacttgaaggcgtttgcacatgc

SEQ ID NO: 2129 - RNA, 56 nt, synthetic construct
  source 1..56: mol_type = other RNA
ctttcaagactaatagattgctccttacgaggagacaacaacagcattattccaga

SEQ ID NO: 2130 - RNA, 56 nt, synthetic construct
  source 1..56: mol_type = other RNA
ctttcaagactaatagattgctccttacgaggagactggaataatgctgttgttga

SEQ ID NO: 2131 - RNA, 56 nt, synthetic construct
  source 1..56: mol_type = other RNA
ctttcaagactaatagattgctccttacgaggagacttccagaagacaccttcttc

SEQ ID NO: 2132 - RNA, 56 nt, synthetic construct
  source 1..56: mol_type = other RNA
ctttcaagactaatagattgctccttacgaggagaccagaagacaccttcttcccc

SEQ ID NO: 2133 - RNA, 56 nt, synthetic construct
  source 1..56: mol_type = other RNA
ctttcaagactaatagattgctccttacgaggagaccctgggctggggaagaaggt

SEQ ID NO: 2134 - RNA, 56 nt, synthetic construct
  source 1..56: mol_type = other RNA
ctttcaagactaatagattgctccttacgaggagacttccccagcccaggtaaggg

SEQ ID NO: 2135 - RNA, 56 nt, synthetic construct
  source 1..56: mol_type = other RNA
ctttcaagactaatagattgctccttacgaggagaccccagcccaggtaagggcag

SEQ ID NO: 2136 - RNA, 56 nt, synthetic construct
  source 1..56: mol_type = other RNA
ctttcaagactaatagattgctccttacgaggagactaaaaggaaaaacagacatt

SEQ ID NO: 2137 - RNA, 56 nt, synthetic construct
  source 1..56: mol_type = other RNA
ctttcaagactaatagattgctccttacgaggagacctaaaaggaaaaacagacat

SEQ ID NO: 2138 - RNA, 56 nt, synthetic construct
  source 1..56: mol_type = other RNA
ctttcaagactaatagattgctccttacgaggagacttccttttagaaagttcctg

SEQ ID NO: 2139 - RNA, 56 nt, synthetic construct
  source 1..56: mol_type = other RNA
ctttcaagactaatagattgctccttacgaggagactccttttagaaagttcctgt

SEQ ID NO: 2140 - RNA, 56 nt, synthetic construct
  source 1..56: mol_type = other RNA
ctttcaagactaatagattgctccttacgaggagacccttttagaaagttcctgtg

SEQ ID NO: 2141 - RNA, 56 nt, synthetic construct
  source 1..56: mol_type = other RNA
ctttcaagactaatagattgctccttacgaggagaccttttagaaagttcctgtga

SEQ ID NO: 2142 - RNA, 56 nt, synthetic construct
  source 1..56: mol_type = other RNA
ctttcaagactaatagattgctccttacgaggagactagaaagttcctgtgatgtc

SEQ ID NO: 2143 - RNA, 56 nt, synthetic construct
  source 1..56: mol_type = other RNA
ctttcaagactaatagattgctccttacgaggagacagaaagttcctgtgatgtca

SEQ ID NO: 2144 - RNA, 56 nt, synthetic construct
  source 1..56: mol_type = other RNA
ctttcaagactaatagattgctccttacgaggagacgaaagttcctgtgatgtcaa

SEQ ID NO: 2145 - RNA, 56 nt, synthetic construct
  source 1..56: mol_type = other RNA
ctttcaagactaatagattgctccttacgaggagacacatcacaggaactttctaa

SEQ ID NO: 2146 - RNA, 56 nt, synthetic construct
  source 1..56: mol_type = other RNA
ctttcaagactaatagattgctccttacgaggagacctgtgatgtcaagctggtcg

SEQ ID NO: 2147 - RNA, 56 nt, synthetic construct
  source 1..56: mol_type = other RNA
ctttcaagactaatagattgctccttacgaggagactcgaccagcttgacatcaca

SEQ ID NO: 2148 - RNA, 56 nt, synthetic construct
  source 1..56: mol_type = other RNA
ctttcaagactaatagattgctccttacgaggagacctcgaccagcttgacatcac

SEQ ID NO: 2149 - RNA, 56 nt, synthetic construct
  source 1..56: mol_type = other RNA
ctttcaagactaatagattgctccttacgaggagactctcgaccagcttgacatca

SEQ ID NO: 2150 - RNA, 56 nt, synthetic construct
  source 1..56: mol_type = other RNA
ctttcaagactaatagattgctccttacgaggagacaaagcttttctcgaccagct

SEQ ID NO: 2151 - RNA, 56 nt, synthetic construct
  source 1..56: mol_type = other RNA
ctttcaagactaatagattgctccttacgaggagaccaaagcttttctcgaccagc

SEQ ID NO: 2152 - RNA, 56 nt, synthetic construct
  source 1..56: mol_type = other RNA
ctttcaagactaatagattgctccttacgaggagaccctgtttcaaagcttttctc

SEQ ID NO: 2153 - RNA, 56 nt, synthetic construct
  source 1..56: mol_type = other RNA
ctttcaagactaatagattgctccttacgaggagacgaaacaggtaagacaggggt

SEQ ID NO: 2154 - RNA, 56 nt, synthetic construct
  source 1..56: mol_type = other RNA
ctttcaagactaatagattgctccttacgaggagacaaacaggtaagacaggggtc

SEQ ID NO: 2155 - RNA, 57 nt, synthetic construct
  source 1..57: mol_type = other RNA
gctggggaccgatcctgattgctcgctgcggcgagactggatatctgtgggacaaga

SEQ ID NO: 2156 - RNA, 57 nt, synthetic construct
  source 1..57: mol_type = other RNA
gctggggaccgatcctgattgctcgctgcggcgagactcccacagatatccagaacc

SEQ ID NO: 2157 - RNA, 57 nt, synthetic construct
  source 1..57: mol_type = other RNA
gctggggaccgatcctgattgctcgctgcggcgagacgagtctctcagctggtacac

SEQ ID NO: 2158 - RNA, 57 nt, synthetic construct
  source 1..57: mol_type = other RNA
gctggggaccgatcctgattgctcgctgcggcgagacagagtctctcagctggtaca

SEQ ID NO: 2159 - RNA, 57 nt, synthetic construct
  source 1..57: mol_type = other RNA
gctggggaccgatcctgattgctcgctgcggcgagactcactggatttagagtctct

SEQ ID NO: 2160 - RNA, 57 nt, synthetic construct
  source 1..57: mol_type = other RNA
gctggggaccgatcctgattgctcgctgcggcgagacagaatcaaaatcggtgaata

SEQ ID NO: 2161 - RNA, 57 nt, synthetic construct
  source 1..57: mol_type = other RNA
gctggggaccgatcctgattgctcgctgcggcgagacgagaatcaaaatcggtgaat

SEQ ID NO: 2162 - RNA, 57 nt, synthetic construct
  source 1..57: mol_type = other RNA
gctggggaccgatcctgattgctcgctgcggcgagacaccgattttgattctcaaac

SEQ ID NO: 2163 - RNA, 57 nt, synthetic construct
  source 1..57: mol_type = other RNA
gctggggaccgatcctgattgctcgctgcggcgagactttgagaatcaaaatcggtg

SEQ ID NO: 2164 - RNA, 57 nt, synthetic construct
  source 1..57: mol_type = other RNA
gctggggaccgatcctgattgctcgctgcggcgagacgtttgagaatcaaaatcggt

SEQ ID NO: 2165 - RNA, 57 nt, synthetic construct
  source 1..57: mol_type = other RNA
gctggggaccgatcctgattgctcgctgcggcgagactgattctcaaacaaatgtgt

SEQ ID NO: 2166 - RNA, 57 nt, synthetic construct
  source 1..57: mol_type = other RNA
gctggggaccgatcctgattgctcgctgcggcgagacgattctcaaacaaatgtgtc

SEQ ID NO: 2167 - RNA, 57 nt, synthetic construct
  source 1..57: mol_type = other RNA
gctggggaccgatcctgattgctcgctgcggcgagacattctcaaacaaatgtgtca

SEQ ID NO: 2168 - RNA, 57 nt, synthetic construct
  source 1..57: mol_type = other RNA
gctggggaccgatcctgattgctcgctgcggcgagactgacacatttgtttgagaat

SEQ ID NO: 2169 - RNA, 57 nt, synthetic construct
  source 1..57: mol_type = other RNA
gctggggaccgatcctgattgctcgctgcggcgagactcaaacaaatgtgtcacaaa

SEQ ID NO: 2170 - RNA, 57 nt, synthetic construct
  source 1..57: mol_type = other RNA
gctggggaccgatcctgattgctcgctgcggcgagacgtgacacatttgtttgagaa

SEQ ID NO: 2171 - RNA, 57 nt, synthetic construct
  source 1..57: mol_type = other RNA
gctggggaccgatcctgattgctcgctgcggcgagacctttgtgacacatttgtttg

SEQ ID NO: 2172 - RNA, 57 nt, synthetic construct
  source 1..57: mol_type = other RNA
gctggggaccgatcctgattgctcgctgcggcgagactgatgtgtatatcacagaca

SEQ ID NO: 2173 - RNA, 57 nt, synthetic construct
  source 1..57: mol_type = other RNA
gctggggaccgatcctgattgctcgctgcggcgagactctgtgatatacacatcaga

SEQ ID NO: 2174 - RNA, 57 nt, synthetic construct
  source 1..57: mol_type = other RNA
gctggggaccgatcctgattgctcgctgcggcgagacgtctgtgatatacacatcag

SEQ ID NO: 2175 - RNA, 57 nt, synthetic construct
  source 1..57: mol_type = other RNA
gctggggaccgatcctgattgctcgctgcggcgagactgtctgtgatatacacatca

SEQ ID NO: 2176 - RNA, 57 nt, synthetic construct
  source 1..57: mol_type = other RNA
gctggggaccgatcctgattgctcgctgcggcgagacaagtccatagacctcatgtc

SEQ ID NO: 2177 - RNA, 57 nt, synthetic construct
  source 1..57: mol_type = other RNA
gctggggaccgatcctgattgctcgctgcggcgagacctcttgaagtccatagacct

SEQ ID NO: 2178 - RNA, 57 nt, synthetic construct
  source 1..57: mol_type = other RNA
gctggggaccgatcctgattgctcgctgcggcgagacaagagcaacagtgctgtggc

SEQ ID NO: 2179 - RNA, 57 nt, synthetic construct
  source 1..57: mol_type = other RNA
gctggggaccgatcctgattgctcgctgcggcgagacctccaggccacagcactgtt

SEQ ID NO: 2180 - RNA, 57 nt, synthetic construct
  source 1..57: mol_type = other RNA
gctggggaccgatcctgattgctcgctgcggcgagacttgctccaggccacagcact

SEQ ID NO: 2181 - RNA, 57 nt, synthetic construct
  source 1..57: mol_type = other RNA
gctggggaccgatcctgattgctcgctgcggcgagacgttgctccaggccacagcac

SEQ ID NO: 2182 - RNA, 57 nt, synthetic construct
  source 1..57: mol_type = other RNA
gctggggaccgatcctgattgctcgctgcggcgagaccacatgcaaagtcagatttg

SEQ ID NO: 2183 - RNA, 57 nt, synthetic construct
  source 1..57: mol_type = other RNA
gctggggaccgatcctgattgctcgctgcggcgagacgcacatgcaaagtcagattt

SEQ ID NO: 2184 - RNA, 57 nt, synthetic construct
  source 1..57: mol_type = other RNA
gctggggaccgatcctgattgctcgctgcggcgagacgcatgtgcaaacgccttcaa

SEQ ID NO: 2185 - RNA, 57 nt, synthetic construct
  source 1..57: mol_type = other RNA
gctggggaccgatcctgattgctcgctgcggcgagacaaggcgtttgcacatgcaaa

SEQ ID NO: 2186 - RNA, 57 nt, synthetic construct
  source 1..57: mol_type = other RNA
gctggggaccgatcctgattgctcgctgcggcgagaccatgtgcaaacgccttcaac

SEQ ID NO: 2187 - RNA, 57 nt, synthetic construct
  source 1..57: mol_type = other RNA
gctggggaccgatcctgattgctcgctgcggcgagacttgaaggcgtttgcacatgc

SEQ ID NO: 2188 - RNA, 57 nt, synthetic construct
  source 1..57: mol_type = other RNA
gctggggaccgatcctgattgctcgctgcggcgagacaacaacagcattattccaga

SEQ ID NO: 2189 - RNA, 57 nt, synthetic construct
  source 1..57: mol_type = other RNA
gctggggaccgatcctgattgctcgctgcggcgagactggaataatgctgttgttga

SEQ ID NO: 2190 - RNA, 57 nt, synthetic construct
  source 1..57: mol_type = other RNA
gctggggaccgatcctgattgctcgctgcggcgagacttccagaagacaccttcttc

SEQ ID NO: 2191 - RNA, 57 nt, synthetic construct
  source 1..57: mol_type = other RNA
gctggggaccgatcctgattgctcgctgcggcgagaccagaagacaccttcttcccc

SEQ ID NO: 2192 - RNA, 57 nt, synthetic construct
  source 1..57: mol_type = other RNA
gctggggaccgatcctgattgctcgctgcggcgagaccctgggctggggaagaaggt

SEQ ID NO: 2193 - RNA, 57 nt, synthetic construct
  source 1..57: mol_type = other RNA
gctggggaccgatcctgattgctcgctgcggcgagacttccccagcccaggtaaggg

SEQ ID NO: 2194 - RNA, 57 nt, synthetic construct
  source 1..57: mol_type = other RNA
gctggggaccgatcctgattgctcgctgcggcgagaccccagcccaggtaagggcag

SEQ ID NO: 2195 - RNA, 57 nt, synthetic construct
  source 1..57: mol_type = other RNA
gctggggaccgatcctgattgctcgctgcggcgagactaaaaggaaaaacagacatt

SEQ ID NO: 2196 - RNA, 57 nt, synthetic construct
  source 1..57: mol_type = other RNA
gctggggaccgatcctgattgctcgctgcggcgagacctaaaaggaaaaacagacat

SEQ ID NO: 2197 - RNA, 57 nt, synthetic construct
  source 1..57: mol_type = other RNA
gctggggaccgatcctgattgctcgctgcggcgagacttccttttagaaagttcctg

SEQ ID NO: 2198 - RNA, 57 nt, synthetic construct
  source 1..57: mol_type = other RNA
gctggggaccgatcctgattgctcgctgcggcgagactccttttagaaagttcctgt

SEQ ID NO: 2199 - RNA, 57 nt, synthetic construct
  source 1..57: mol_type = other RNA
gctggggaccgatcctgattgctcgctgcggcgagacccttttagaaagttcctgtg

SEQ ID NO: 2200 - RNA, 57 nt, synthetic construct
  source 1..57: mol_type = other RNA
gctggggaccgatcctgattgctcgctgcggcgagaccttttagaaagttcctgtga

SEQ ID NO: 2201 - RNA, 57 nt, synthetic construct
  source 1..57: mol_type = other RNA
gctggggaccgatcctgattgctcgctgcggcgagactagaaagttcctgtgatgtc

SEQ ID NO: 2202 - RNA, 57 nt, synthetic construct
  source 1..57: mol_type = other RNA
gctggggaccgatcctgattgctcgctgcggcgagacagaaagttcctgtgatgtca

SEQ ID NO: 2203 - RNA, 57 nt, synthetic construct
  source 1..57: mol_type = other RNA
gctggggaccgatcctgattgctcgctgcggcgagacgaaagttcctgtgatgtcaa

SEQ ID NO: 2204 - RNA, 57 nt, synthetic construct
  source 1..57: mol_type = other RNA
gctggggaccgatcctgattgctcgctgcggcgagacacatcacaggaactttctaa

SEQ ID NO: 2205 - RNA, 57 nt, synthetic construct
  source 1..57: mol_type = other RNA
gctggggaccgatcctgattgctcgctgcggcgagacctgtgatgtcaagctggtcg

SEQ ID NO: 2206 - RNA, 57 nt, synthetic construct
  source 1..57: mol_type = other RNA
gctggggaccgatcctgattgctcgctgcggcgagactcgaccagcttgacatcaca

SEQ ID NO: 2207 - RNA, 57 nt, synthetic construct
  source 1..57: mol_type = other RNA
gctggggaccgatcctgattgctcgctgcggcgagacctcgaccagcttgacatcac

SEQ ID NO: 2208 - RNA, 57 nt, synthetic construct
  source 1..57: mol_type = other RNA
gctggggaccgatcctgattgctcgctgcggcgagactctcgaccagcttgacatca

SEQ ID NO: 2209 - RNA, 57 nt, synthetic construct
  source 1..57: mol_type = other RNA
gctggggaccgatcctgattgctcgctgcggcgagacaaagcttttctcgaccagct

SEQ ID NO: 2210 - RNA, 57 nt, synthetic construct
  source 1..57: mol_type = other RNA
gctggggaccgatcctgattgctcgctgcggcgagaccaaagcttttctcgaccagc

SEQ ID NO: 2211 - RNA, 57 nt, synthetic construct
  source 1..57: mol_type = other RNA
gctggggaccgatcctgattgctcgctgcggcgagaccctgtttcaaagcttttctc

SEQ ID NO: 2212 - RNA, 57 nt, synthetic construct
  source 1..57: mol_type = other RNA
gctggggaccgatcctgattgctcgctgcggcgagacgaaacaggtaagacaggggt

SEQ ID NO: 2213 - RNA, 57 nt, synthetic construct
  source 1..57: mol_type = other RNA
gctggggaccgatcctgattgctcgctgcggcgagacaaacaggtaagacaggggtc

SEQ ID NO: 2214 - RNA, 56 nt, synthetic construct
  source 1..56: mol_type = other RNA
ctttcaagactaatagattgctccttacgaggagacaatataagtggaggcgtcgc

SEQ ID NO: 2215 - RNA, 56 nt, synthetic construct
  source 1..56: mol_type = other RNA
ctttcaagactaatagattgctccttacgaggagacatataagtggaggcgtcgcg

SEQ ID NO: 2216 - RNA, 56 nt, synthetic construct
  source 1..56: mol_type = other RNA
ctttcaagactaatagattgctccttacgaggagacaggaatgcccgccagcgcga

SEQ ID NO: 2217 - RNA, 56 nt, synthetic construct
  source 1..56: mol_type = other RNA
ctttcaagactaatagattgctccttacgaggagacctgaagctgacagcattcgg

SEQ ID NO: 2218 - RNA, 56 nt, synthetic construct; identical to SEQ ID NO: 1582
  source 1..56: mol_type = other RNA

SEQ ID NO: 2219 - RNA, 56 nt, synthetic construct
  source 1..56: mol_type = other RNA
ctttcaagactaatagattgctccttacgaggagacgctgtgctcgcgctactctc

SEQ ID NO: 2220 - RNA, 56 nt, synthetic construct
  source 1..56: mol_type = other RNA
ctttcaagactaatagattgctccttacgaggagacctggcctggaggctatccag

SEQ ID NO: 2221 - RNA, 56 nt, synthetic construct
  source 1..56: mol_type = other RNA
ctttcaagactaatagattgctccttacgaggagactggcctggaggctatccagc

SEQ ID NO: 2222 - RNA, 56 nt, synthetic construct
  source 1..56: mol_type = other RNA
ctttcaagactaatagattgctccttacgaggagacatgtgtcttttcccgatatt

SEQ ID NO: 2223 - RNA, 56 nt, synthetic construct
  source 1..56: mol_type = other RNA
ctttcaagactaatagattgctccttacgaggagactcccgatattcctcaggtac

SEQ ID NO: 2224 - RNA, 56 nt, synthetic construct
  source 1..56: mol_type = other RNA
ctttcaagactaatagattgctccttacgaggagaccccgatattcctcaggtact

SEQ ID NO: 2225 - RNA, 56 nt, synthetic construct
  source 1..56: mol_type = other RNA
ctttcaagactaatagattgctccttacgaggagacccgatattcctcaggtactc

SEQ ID NO: 2226 - RNA, 56 nt, synthetic construct
  source 1..56: mol_type = other RNA
ctttcaagactaatagattgctccttacgaggagacgagtacctgaggaatatcgg

SEQ ID NO: 2227 - RNA, 56 nt, synthetic construct
  source 1..56: mol_type = other RNA
ctttcaagactaatagattgctccttacgaggagacggagtacctgaggaatatcg

SEQ ID NO: 2228 - RNA, 56 nt, synthetic construct
  source 1..56: mol_type = other RNA
ctttcaagactaatagattgctccttacgaggagacctcaggtactccaaagattc

SEQ ID NO: 2229 - RNA, 56 nt, synthetic construct
  source 1..56: mol_type = other RNA
ctttcaagactaatagattgctccttacgaggagacaggtttactcacgtcatcca

SEQ ID NO: 2230 - RNA, 56 nt, synthetic construct
  source 1..56: mol_type = other RNA
ctttcaagactaatagattgctccttacgaggagacactcacgtcatccagcagag

SEQ ID NO: 2231 - RNA, 56 nt, synthetic construct
  source 1..56: mol_type = other RNA
ctttcaagactaatagattgctccttacgaggagacctcacgtcatccagcagaga

SEQ ID NO: 2232 - RNA, 56 nt, synthetic construct
  source 1..56: mol_type = other RNA
ctttcaagactaatagattgctccttacgaggagactctgctggatgacgtgagta

SEQ ID NO: 2233 - RNA, 56 nt, synthetic construct
  source 1..56: mol_type = other RNA
ctttcaagactaatagattgctccttacgaggagaccattctctgctggatgacgt

SEQ ID NO: 2234 - RNA, 56 nt, synthetic construct
  source 1..56: mol_type = other RNA
ctttcaagactaatagattgctccttacgaggagacccattctctgctggatgacg

SEQ ID NO: 2235 - RNA, 56 nt, synthetic construct
  source 1..56: mol_type = other RNA
ctttcaagactaatagattgctccttacgaggagacactttccattctctgctgga

SEQ ID NO: 2236 - RNA, 56 nt, synthetic construct
  source 1..56: mol_type = other RNA
ctttcaagactaatagattgctccttacgaggagacgactttccattctctgctgg

SEQ ID NO: 2237 - RNA, 56 nt, synthetic construct
  source 1..56: mol_type = other RNA
ctttcaagactaatagattgctccttacgaggagacaggaaatttgactttccatt

SEQ ID NO: 2238 - RNA, 56 nt, synthetic construct
  source 1..56: mol_type = other RNA
ctttcaagactaatagattgctccttacgaggagaccctgaattgctatgtgtctg

SEQ ID NO: 2239 - RNA, 56 nt, synthetic construct
  source 1..56: mol_type = other RNA
ctttcaagactaatagattgctccttacgaggagacctgaattgctatgtgtctgg

SEQ ID NO: 2240 - RNA, 56 nt, synthetic construct
  source 1..56: mol_type = other RNA
ctttcaagactaatagattgctccttacgaggagacctatgtgtctgggtttcatc

SEQ ID NO: 2241 - RNA, 56 nt, synthetic construct
  source 1..56: mol_type = other RNA
ctttcaagactaatagattgctccttacgaggagacaatgtcggatggatgaaacc

SEQ ID NO: 2242 - RNA, 56 nt, synthetic construct
  source 1..56: mol_type = other RNA
ctttcaagactaatagattgctccttacgaggagaccatccatccgacattgaagt

SEQ ID NO: 2243 - RNA, 56 nt, synthetic construct
  source 1..56: mol_type = other RNA
ctttcaagactaatagattgctccttacgaggagacatccatccgacattgaagtt

SEQ ID NO: 2244 - RNA, 56 nt, synthetic construct
  source 1..56: mol_type = other RNA
ctttcaagactaatagattgctccttacgaggagacagtaagtcaacttcaatgtc

SEQ ID NO: 2245 - RNA, 56 nt, synthetic construct
  source 1..56: mol_type = other RNA
ctttcaagactaatagattgctccttacgaggagacttcagtaagtcaacttcaat

SEQ ID NO: 2246 - RNA, 56 nt, synthetic construct
  source 1..56: mol_type = other RNA
ctttcaagactaatagattgctccttacgaggagacaagttgacttactgaagaat

SEQ ID NO: 2247 - RNA, 56 nt, synthetic construct
  source 1..56: mol_type = other RNA
ctttcaagactaatagattgctccttacgaggagacacttactgaagaatggagag

SEQ ID NO: 2248 - RNA, 56 nt, synthetic construct
  source 1..56: mol_type = other RNA
ctttcaagactaatagattgctccttacgaggagactctctccattcttcagtaag

SEQ ID NO: 2249 - RNA, 56 nt, synthetic construct
  source 1..56: mol_type = other RNA
ctttcaagactaatagattgctccttacgaggagacctgaagaatggagagagaat

SEQ ID NO: 2250 - RNA, 56 nt, synthetic construct
  source 1..56: mol_type = other RNA
ctttcaagactaatagattgctccttacgaggagacaattctctctccattcttca

SEQ ID NO: 2251 - RNA, 56 nt, synthetic construct
  source 1..56: mol_type = other RNA
ctttcaagactaatagattgctccttacgaggagaccaattctctctccattcttc

SEQ ID NO: 2252 - RNA, 56 nt, synthetic construct
  source 1..56: mol_type = other RNA
ctttcaagactaatagattgctccttacgaggagactcaattctctctccattctt

SEQ ID NO: 2253 - RNA, 56 nt, synthetic construct
  source 1..56: mol_type = other RNA
ctttcaagactaatagattgctccttacgaggagacttcaattctctctccattct

SEQ ID NO: 2254 - RNA, 56 nt, synthetic construct
  source 1..56: mol_type = other RNA
ctttcaagactaatagattgctccttacgaggagacaaaaagtggagcattcagac

SEQ ID NO: 2255 - RNA, 56 nt, synthetic construct
  source 1..56: mol_type = other RNA
ctttcaagactaatagattgctccttacgaggagacctgaaagacaagtctgaatg

SEQ ID NO: 2256 - RNA, 56 nt, synthetic construct
  source 1..56: mol_type = other RNA
ctttcaagactaatagattgctccttacgaggagacagacttgtctttcagcaagg

SEQ ID NO: 2257 - RNA, 56 nt, synthetic construct
  source 1..56: mol_type = other RNA
ctttcaagactaatagattgctccttacgaggagactctttcagcaaggactggtc

SEQ ID NO: 2258 - RNA, 56 nt, synthetic construct
  source 1..56: mol_type = other RNA
ctttcaagactaatagattgctccttacgaggagaccagcaaggactggtctttct

SEQ ID NO: 2259 - RNA, 56 nt, synthetic construct; identical to SEQ ID NO: 1381
  source 1..56: mol_type = other RNA

SEQ ID NO: 2260 - RNA, 56 nt, synthetic construct
  source 1..56: mol_type = other RNA
ctttcaagactaatagattgctccttacgaggagacctatctcttgtactacactg

SEQ ID NO: 2261 - RNA, 56 nt, synthetic construct
  source 1..56: mol_type = other RNA
ctttcaagactaatagattgctccttacgaggagactatctcttgtactacactga

SEQ ID NO: 2262 - RNA, 56 nt, synthetic construct
  source 1..56: mol_type = other RNA
ctttcaagactaatagattgctccttacgaggagacagtgtagtacaagagataga

SEQ ID NO: 2263 - RNA, 56 nt, synthetic construct
  source 1..56: mol_type = other RNA
ctttcaagactaatagattgctccttacgaggagactactacactgaattcacccc

SEQ ID NO: 2264 - RNA, 56 nt, synthetic construct
  source 1..56: mol_type = other RNA
ctttcaagactaatagattgctccttacgaggagacagtgggggtgaattcagtgt

SEQ ID NO: 2265 - RNA, 56 nt, synthetic construct
  source 1..56: mol_type = other RNA
ctttcaagactaatagattgctccttacgaggagaccagtgggggtgaattcagtg

SEQ ID NO: 2266 - RNA, 56 nt, synthetic construct
  source 1..56: mol_type = other RNA
ctttcaagactaatagattgctccttacgaggagactcagtgggggtgaattcagt

SEQ ID NO: 2267 - RNA, 56 nt, synthetic construct
  source 1..56: mol_type = other RNA
ctttcaagactaatagattgctccttacgaggagacttcagtgggggtgaattcag

SEQ ID NO: 2268 - RNA, 56 nt, synthetic construct
  source 1..56: mol_type = other RNA
ctttcaagactaatagattgctccttacgaggagacacccccactgaaaaagatga

SEQ ID NO: 2269 - RNA, 56 nt, synthetic construct
  source 1..56: mol_type = other RNA
ctttcaagactaatagattgctccttacgaggagacacacggcaggcatactcatc

SEQ ID NO: 2270 - RNA, 56 nt, synthetic construct
  source 1..56: mol_type = other RNA
ctttcaagactaatagattgctccttacgaggagacggctgtgacaaagtcacatg

SEQ ID NO: 2271 - RNA, 56 nt, synthetic construct
  source 1..56: mol_type = other RNA
ctttcaagactaatagattgctccttacgaggagacgtcacagcccaagatagtta

SEQ ID NO: 2272 - RNA, 56 nt, synthetic construct
  source 1..56: mol_type = other RNA
ctttcaagactaatagattgctccttacgaggagactcacagcccaagatagttaa

SEQ ID NO: 2273 - RNA, 56 nt, synthetic construct
  source 1..56: mol_type = other RNA
ctttcaagactaatagattgctccttacgaggagacactatcttgggctgtgacaa

SEQ ID NO: 2274 - RNA, 56 nt, synthetic construct
  source 1..56: mol_type = other RNA
ctttcaagactaatagattgctccttacgaggagacccccacttaactatcttggg

SEQ ID NO: 2275 - RNA, 57 nt, synthetic construct
  source 1..57: mol_type = other RNA
gctggggaccgatcctgattgctcgctgcggcgagacaatataagtggaggcgtcgc

SEQ ID NO: 2276 - RNA, 57 nt, synthetic construct
  source 1..57: mol_type = other RNA
gctggggaccgatcctgattgctcgctgcggcgagacatataagtggaggcgtcgcg

SEQ ID NO: 2277 - RNA, 57 nt, synthetic construct
  source 1..57: mol_type = other RNA
gctggggaccgatcctgattgctcgctgcggcgagacaggaatgcccgccagcgcga

SEQ ID NO: 2278 - RNA, 57 nt, synthetic construct
  source 1..57: mol_type = other RNA
gctggggaccgatcctgattgctcgctgcggcgagacctgaagctgacagcattcgg

SEQ ID NO: 2279 - RNA, 57 nt, synthetic construct
  source 1..57: mol_type = other RNA
gctggggaccgatcctgattgctcgctgcggcgagacgggccgagatgtctcgctcc

SEQ ID NO: 2280 - RNA, 57 nt, synthetic construct
  source 1..57: mol_type = other RNA
gctggggaccgatcctgattgctcgctgcggcgagacgctgtgctcgcgctactctc

SEQ ID NO: 2281 - RNA, 57 nt, synthetic construct
  source 1..57: mol_type = other RNA
gctggggaccgatcctgattgctcgctgcggcgagacctggcctggaggctatccag

SEQ ID NO: 2282 - RNA, 57 nt, synthetic construct
  source 1..57: mol_type = other RNA
gctggggaccgatcctgattgctcgctgcggcgagactggcctggaggctatccagc

SEQ ID NO: 2283 - RNA, 57 nt, synthetic construct
  source 1..57: mol_type = other RNA
gctggggaccgatcctgattgctcgctgcggcgagacatgtgtcttttcccgatatt

SEQ ID NO: 2284 - RNA, 57 nt, synthetic construct
  source 1..57: mol_type = other RNA
gctggggaccgatcctgattgctcgctgcggcgagactcccgatattcctcaggtac

SEQ ID NO: 2285 - RNA, 57 nt, synthetic construct
  source 1..57: mol_type = other RNA
gctggggaccgatcctgattgctcgctgcggcgagaccccgatattcctcaggtact

SEQ ID NO: 2286 - RNA, 57 nt, synthetic construct
  source 1..57: mol_type = other RNA
gctggggaccgatcctgattgctcgctgcggcgagacccgatattcctcaggtactc

SEQ ID NO: 2287 - RNA, 57 nt, synthetic construct
  source 1..57: mol_type = other RNA
gctggggaccgatcctgattgctcgctgcggcgagacgagtacctgaggaatatcgg

SEQ ID NO: 2288 - RNA, 57 nt, synthetic construct
  source 1..57: mol_type = other RNA
gctggggaccgatcctgattgctcgctgcggcgagacggagtacctgaggaatatcg

SEQ ID NO: 2289 - RNA, 57 nt, synthetic construct
  source 1..57: mol_type = other RNA
gctggggaccgatcctgattgctcgctgcggcgagacctcaggtactccaaagattc

SEQ ID NO: 2290 - RNA, 57 nt, synthetic construct
  source 1..57: mol_type = other RNA
gctggggaccgatcctgattgctcgctgcggcgagacaggtttactcacgtcatcca

SEQ ID NO: 2291 - RNA, 57 nt, synthetic construct
  source 1..57: mol_type = other RNA
gctggggaccgatcctgattgctcgctgcggcgagacactcacgtcatccagcagag

SEQ ID NO: 2292 - RNA, 57 nt, synthetic construct
  source 1..57: mol_type = other RNA
gctggggaccgatcctgattgctcgctgcggcgagacctcacgtcatccagcagaga

SEQ ID NO: 2293 - RNA, 57 nt, synthetic construct
  source 1..57: mol_type = other RNA
gctggggaccgatcctgattgctcgctgcggcgagactctgctggatgacgtgagta

SEQ ID NO: 2294 - RNA, 57 nt, synthetic construct
  source 1..57: mol_type = other RNA
gctggggaccgatcctgattgctcgctgcggcgagaccattctctgctggatgacgt

SEQ ID NO: 2295 - RNA, 57 nt, synthetic construct
  source 1..57: mol_type = other RNA
gctggggaccgatcctgattgctcgctgcggcgagacccattctctgctggatgacg

SEQ ID NO: 2296 - RNA, 57 nt, synthetic construct
  source 1..57: mol_type = other RNA
gctggggaccgatcctgattgctcgctgcggcgagacactttccattctctgctgga

SEQ ID NO: 2297 - RNA, 57 nt, synthetic construct
  source 1..57: mol_type = other RNA
gctggggaccgatcctgattgctcgctgcggcgagacgactttccattctctgctgg

SEQ ID NO: 2298 - RNA, 57 nt, synthetic construct
  source 1..57: mol_type = other RNA
gctggggaccgatcctgattgctcgctgcggcgagacaggaaatttgactttccatt

SEQ ID NO: 2299 - RNA, 57 nt, synthetic construct
  source 1..57: mol_type = other RNA
gctggggaccgatcctgattgctcgctgcggcgagaccctgaattgctatgtgtctg

SEQ ID NO: 2300 - RNA, 57 nt, synthetic construct
  source 1..57: mol_type = other RNA
gctggggaccgatcctgattgctcgctgcggcgagacctgaattgctatgtgtctgg

SEQ ID NO: 2301 - RNA, 57 nt, synthetic construct
  source 1..57: mol_type = other RNA
gctggggaccgatcctgattgctcgctgcggcgagacctatgtgtctgggtttcatc

SEQ ID NO: 2302 - RNA, 57 nt, synthetic construct
  source 1..57: mol_type = other RNA
gctggggaccgatcctgattgctcgctgcggcgagacaatgtcggatggatgaaacc

SEQ ID NO: 2303 - RNA, 57 nt, synthetic construct
  source 1..57: mol_type = other RNA
gctggggaccgatcctgattgctcgctgcggcgagaccatccatccgacattgaagt

SEQ ID NO: 2304 - RNA, 57 nt, synthetic construct
  source 1..57: mol_type = other RNA
gctggggaccgatcctgattgctcgctgcggcgagacatccatccgacattgaagtt

SEQ ID NO: 2305 - RNA, 57 nt, synthetic construct
  source 1..57: mol_type = other RNA
gctggggaccgatcctgattgctcgctgcggcgagacagtaagtcaacttcaatgtc

SEQ ID NO: 2306 - RNA, 57 nt, synthetic construct
  source 1..57: mol_type = other RNA
gctggggaccgatcctgattgctcgctgcggcgagacttcagtaagtcaacttcaat

SEQ ID NO: 2307 - RNA, 57 nt, synthetic construct
  source 1..57: mol_type = other RNA
gctggggaccgatcctgattgctcgctgcggcgagacaagttgacttactgaagaat

SEQ ID NO: 2308 - RNA, 57 nt, synthetic construct
  source 1..57: mol_type = other RNA
gctggggaccgatcctgattgctcgctgcggcgagacacttactgaagaatggagag

SEQ ID NO: 2309 - RNA, 57 nt, synthetic construct
  source 1..57: mol_type = other RNA
gctggggaccgatcctgattgctcgctgcggcgagactctctccattcttcagtaag

SEQ ID NO: 2310 - RNA, 57 nt, synthetic construct
  source 1..57: mol_type = other RNA
gctggggaccgatcctgattgctcgctgcggcgagacctgaagaatggagagagaat

SEQ ID NO: 2311 - RNA, 57 nt, synthetic construct
  source 1..57: mol_type = other RNA
gctggggaccgatcctgattgctcgctgcggcgagacaattctctctccattcttca

SEQ ID NO: 2312 - RNA, 57 nt, synthetic construct
  source 1..57: mol_type = other RNA
gctggggaccgatcctgattgctcgctgcggcgagaccaattctctctccattcttc

SEQ ID NO: 2313 - RNA, 57 nt, synthetic construct
  source 1..57: mol_type = other RNA
gctggggaccgatcctgattgctcgctgcggcgagactcaattctctctccattctt

SEQ ID NO: 2314 - RNA, 57 nt, synthetic construct
  source 1..57: mol_type = other RNA
gctggggaccgatcctgattgctcgctgcggcgagacttcaattctctctccattct

SEQ ID NO: 2315 - RNA, 57 nt, synthetic construct
  source 1..57: mol_type = other RNA
gctggggaccgatcctgattgctcgctgcggcgagacaaaaagtggagcattcagac

SEQ ID NO: 2316 - RNA, 57 nt, synthetic construct
  source 1..57: mol_type = other RNA
gctggggaccgatcctgattgctcgctgcggcgagacctgaaagacaagtctgaatg

SEQ ID NO: 2317 - RNA, 57 nt, synthetic construct
  source 1..57: mol_type = other RNA
gctggggaccgatcctgattgctcgctgcggcgagacagacttgtctttcagcaagg

SEQ ID NO: 2318 - RNA, 57 nt, synthetic construct
  source 1..57: mol_type = other RNA
gctggggaccgatcctgattgctcgctgcggcgagactctttcagcaaggactggtc

SEQ ID NO: 2319 - RNA, 57 nt, synthetic construct
  source 1..57: mol_type = other RNA
gctggggaccgatcctgattgctcgctgcggcgagaccagcaaggactggtctttct

SEQ ID NO: 2320 - RNA, 57 nt, synthetic construct
  source 1..57: mol_type = other RNA
gctggggaccgatcctgattgctcgctgcggcgagacagcaaggactggtctttcta

SEQ ID NO: 2321 - RNA, 57 nt, synthetic construct
  source 1..57: mol_type = other RNA
gctggggaccgatcctgattgctcgctgcggcgagacctatctcttgtactacactg

SEQ ID NO: 2322 - RNA, 57 nt, synthetic construct
  source 1..57: mol_type = other RNA
gctggggaccgatcctgattgctcgctgcggcgagactatctcttgtactacactga

SEQ ID NO: 2323 - RNA, 57 nt, synthetic construct
  source 1..57: mol_type = other RNA
gctggggaccgatcctgattgctcgctgcggcgagacagtgtagtacaagagataga

SEQ ID NO: 2324 - RNA, 57 nt, synthetic construct
  source 1..57: mol_type = other RNA
gctggggaccgatcctgattgctcgctgcggcgagactactacactgaattcacccc

SEQ ID NO: 2325 - RNA, 57 nt, synthetic construct
  source 1..57: mol_type = other RNA
gctggggaccgatcctgattgctcgctgcggcgagacagtgggggtgaattcagtgt

SEQ ID NO: 2326 - RNA, 57 nt, synthetic construct
  source 1..57: mol_type = other RNA
gctggggaccgatcctgattgctcgctgcggcgagaccagtgggggtgaattcagtg

SEQ ID NO: 2327 - RNA, 57 nt, synthetic construct
  source 1..57: mol_type = other RNA
gctggggaccgatcctgattgctcgctgcggcgagactcagtgggggtgaattcagt

SEQ ID NO: 2328 - RNA, 57 nt, synthetic construct
  source 1..57: mol_type = other RNA
gctggggaccgatcctgattgctcgctgcggcgagacttcagtgggggtgaattcag

SEQ ID NO: 2329 - RNA, 57 nt, synthetic construct
  source 1..57: mol_type = other RNA
gctggggaccgatcctgattgctcgctgcggcgagacacccccactgaaaaagatga

SEQ ID NO: 2330 - RNA, 57 nt, synthetic construct
  source 1..57: mol_type = other RNA
gctggggaccgatcctgattgctcgctgcggcgagacacacggcaggcatactcatc

SEQ ID NO: 2331 - RNA, 57 nt, synthetic construct
  source 1..57: mol_type = other RNA
gctggggaccgatcctgattgctcgctgcggcgagacggctgtgacaaagtcacatg

SEQ ID NO: 2332 - RNA, 57 nt, synthetic construct
  source 1..57: mol_type = other RNA
gctggggaccgatcctgattgctcgctgcggcgagacgtcacagcccaagatagtta

SEQ ID NO: 2333 - RNA, 57 nt, synthetic construct
  source 1..57: mol_type = other RNA
gctggggaccgatcctgattgctcgctgcggcgagactcacagcccaagatagttaa

SEQ ID NO: 2334 - RNA, 57 nt, synthetic construct
  source 1..57: mol_type = other RNA
gctggggaccgatcctgattgctcgctgcggcgagacactatcttgggctgtgacaa

SEQ ID NO: 2335 - RNA, 57 nt, synthetic construct
  source 1..57: mol_type = other RNA
gctggggaccgatcctgattgctcgctgcggcgagacccccacttaactatcttggg

SEQ ID NO: 2336 - skipped

SEQ ID NO: 2337 - RNA, 37 nt, synthetic construct
  source 1..37: mol_type = other RNA
attgctccttacgaggagaccatccatccgacattga

SEQ ID NO: 2338 - RNA, 37 nt, synthetic construct
  source 1..37: mol_type = other RNA
attgctccttacgaggagacatccatccgacattgaa

SEQ ID NO: 2339 - RNA, 37 nt, synthetic construct
  source 1..37: mol_type = other RNA
attgctccttacgaggagacagtaagtcaacttcaat

SEQ ID NO: 2340 - RNA, 37 nt, synthetic construct
  source 1..37: mol_type = other RNA
attgctccttacgaggagacttcagtaagtcaacttc

SEQ ID NO: 2341 - RNA, 37 nt, synthetic construct
  source 1..37: mol_type = other RNA
attgctccttacgaggagacaagttgacttactgaag

SEQ ID NO: 2342 - RNA, 37 nt, synthetic construct
  source 1..37: mol_type = other RNA
attgctccttacgaggagacacttactgaagaatgga

SEQ ID NO: 2343 - RNA, 37 nt, synthetic construct
  source 1..37: mol_type = other RNA
attgctccttacgaggagactctctccattcttcagt

SEQ ID NO: 2344 - RNA, 37 nt, synthetic construct
  source 1..37: mol_type = other RNA
attgctccttacgaggagacctgaagaatggagagag

SEQ ID NO: 2345 - RNA, 37 nt, synthetic construct
  source 1..37: mol_type = other RNA
attgctccttacgaggagacaattctctctccattct

SEQ ID NO: 2346 - RNA, 37 nt, synthetic construct
  source 1..37: mol_type = other RNA
attgctccttacgaggagaccaattctctctccattc

SEQ ID NO: 2347 - RNA, 37 nt, synthetic construct
  source 1..37: mol_type = other RNA
attgctccttacgaggagactcaattctctctccatt

SEQ ID NO: 2348 - RNA, 37 nt, synthetic construct
  source 1..37: mol_type = other RNA
attgctccttacgaggagacttcaattctctctccat

SEQ ID NO: 2349 - RNA, 37 nt, synthetic construct
  source 1..37: mol_type = other RNA
attgctccttacgaggagacaaaaagtggagcattca

SEQ ID NO: 2350 - RNA, 37 nt, synthetic construct
  source 1..37: mol_type = other RNA
attgctccttacgaggagacctgaaagacaagtctga

SEQ ID NO: 2351 - RNA, 37 nt, synthetic construct
  source 1..37: mol_type = other RNA
attgctccttacgaggagacagacttgtctttcagca

SEQ ID NO: 2352 - RNA, 37 nt, synthetic construct
  source 1..37: mol_type = other RNA
attgctccttacgaggagactctttcagcaaggactg

SEQ ID NO: 2353 - RNA, 37 nt, synthetic construct
  source 1..37: mol_type = other RNA
attgctccttacgaggagaccagcaaggactggtctt

SEQ ID NO: 2354 - RNA, 37 nt, synthetic construct
  source 1..37: mol_type = other RNA
attgctccttacgaggagacagcaaggactggtcttt

SEQ ID NO: 2355 - RNA, 37 nt, synthetic construct
  source 1..37: mol_type = other RNA
attgctccttacgaggagacctatctcttgtactaca

SEQ ID NO: 2356 - RNA, 37 nt, synthetic construct
  source 1..37: mol_type = other RNA
attgctccttacgaggagactatctcttgtactacac

SEQ ID NO: 2357 - RNA, 37 nt, synthetic construct
  source 1..37: mol_type = other RNA
attgctccttacgaggagacagtgtagtacaagagat

SEQ ID NO: 2358 - RNA, 37 nt, synthetic construct
  source 1..37: mol_type = other RNA
attgctccttacgaggagactactacactgaattcac

SEQ ID NO: 2359 - RNA, 37 nt, synthetic construct
  source 1..37: mol_type = other RNA
attgctccttacgaggagacagtgggggtgaattcag

SEQ ID NO: 2360 - RNA, 37 nt, synthetic construct; identical to SEQ ID NO: 1356
  source 1..37: mol_type = other RNA

SEQ ID NO: 2361 - RNA, 37 nt, synthetic construct
  source 1..37: mol_type = other RNA
attgctccttacgaggagactcagtgggggtgaattc

SEQ ID NO: 2362 - RNA, 37 nt, synthetic construct
  source 1..37: mol_type = other RNA
attgctccttacgaggagacttcagtgggggtgaatt

SEQ ID NO: 2363 - RNA, 37 nt, synthetic construct
  source 1..37: mol_type = other RNA
attgctccttacgaggagacacccccactgaaaaaga

SEQ ID NO: 2364 - RNA, 37 nt, synthetic construct
  source 1..37: mol_type = other RNA
attgctccttacgaggagacacacggcaggcatactc

SEQ ID NO: 2365 - RNA, 37 nt, synthetic construct
  source 1..37: mol_type = other RNA
attgctccttacgaggagacggctgtgacaaagtcac

SEQ ID NO: 2366 - RNA, 37 nt, synthetic construct
  source 1..37: mol_type = other RNA
attgctccttacgaggagacgtcacagcccaagatag

SEQ ID NO: 2367 - RNA, 37 nt, synthetic construct
  source 1..37: mol_type = other RNA
attgctccttacgaggagactcacagcccaagatagt

SEQ ID NO: 2368 - RNA, 37 nt, synthetic construct
  source 1..37: mol_type = other RNA
attgctccttacgaggagacactatcttgggctgtga

SEQ ID NO: 2369 - RNA, 37 nt, synthetic construct
  source 1..37: mol_type = other RNA
attgctccttacgaggagacccccacttaactatctt

SEQ ID NO: 2370 - RNA, 37 nt, synthetic construct
  source 1..37: mol_type = other RNA
attgctccttacgaggagactggatatctgtgggaca

SEQ ID NO: 2371 - RNA, 37 nt, synthetic construct
  source 1..37: mol_type = other RNA
attgctccttacgaggagactcccacagatatccaga

SEQ ID NO: 2372 - skipped

SEQ ID NO: 2373 - RNA, 37 nt, synthetic construct
  source 1..37: mol_type = other RNA
attgctccttacgaggagacagagtctctcagctggt

SEQ ID NO: 2374 - RNA, 37 nt, synthetic construct
  source 1..37: mol_type = other RNA
attgctccttacgaggagactcactggatttagagtc

SEQ ID NO: 2375 - RNA, 37 nt, synthetic construct
  source 1..37: mol_type = other RNA
attgctccttacgaggagacagaatcaaaatcggtga

SEQ ID NO: 2376 - RNA, 37 nt, synthetic construct
  source 1..37: mol_type = other RNA
attgctccttacgaggagacgagaatcaaaatcggtg

SEQ ID NO: 2377 - RNA, 37 nt, synthetic construct
  source 1..37: mol_type = other RNA
attgctccttacgaggagacaccgattttgattctca

SEQ ID NO: 2378 - RNA, 37 nt, synthetic construct
  source 1..37: mol_type = other RNA
attgctccttacgaggagactttgagaatcaaaatcg

SEQ ID NO: 2379 - RNA, 37 nt, synthetic construct
  source 1..37: mol_type = other RNA
attgctccttacgaggagacgtttgagaatcaaaatc

SEQ ID NO: 2380 - RNA, 37 nt, synthetic construct
  source 1..37: mol_type = other RNA
attgctccttacgaggagactgattctcaaacaaatg

SEQ ID NO: 2381 - RNA, 37 nt, synthetic construct
  source 1..37: mol_type = other RNA
attgctccttacgaggagacgattctcaaacaaatgt

SEQ ID NO: 2382 - RNA, 37 nt, synthetic construct
  source 1..37: mol_type = other RNA
attgctccttacgaggagacattctcaaacaaatgtg

SEQ ID NO: 2383 - RNA, 37 nt, synthetic construct
  source 1..37: mol_type = other RNA
attgctccttacgaggagactgacacatttgtttgag

SEQ ID NO: 2384 - RNA, 37 nt, synthetic construct
  source 1..37: mol_type = other RNA
attgctccttacgaggagactcaaacaaatgtgtcac

SEQ ID NO: 2385 - RNA, 37 nt, synthetic construct
  source 1..37: mol_type = other RNA
attgctccttacgaggagacgtgacacatttgtttga

SEQ ID NO: 2386 - RNA, 37 nt, synthetic construct
  source 1..37: mol_type = other RNA
attgctccttacgaggagacctttgtgacacatttgt

SEQ ID NO: 2387 - RNA, 37 nt, synthetic construct
  source 1..37: mol_type = other RNA
attgctccttacgaggagactgatgtgtatatcacag

SEQ ID NO: 2388 - RNA, 37 nt, synthetic construct
  source 1..37: mol_type = other RNA
attgctccttacgaggagactctgtgatatacacatc

SEQ ID NO: 2389 - RNA, 37 nt, synthetic construct
  source 1..37: mol_type = other RNA
attgctccttacgaggagacgtctgtgatatacacat

SEQ ID NO: 2390 - RNA, 37 nt, synthetic construct
  source 1..37: mol_type = other RNA
attgctccttacgaggagactgtctgtgatatacaca

SEQ ID NO: 2391 - RNA, 37 nt, synthetic construct
  source 1..37: mol_type = other RNA
attgctccttacgaggagacaagtccatagacctcat

SEQ ID NO: 2392 - RNA, 37 nt, synthetic construct
  source 1..37: mol_type = other RNA
attgctccttacgaggagacctcttgaagtccataga

SEQ ID NO: 2393 - RNA, 37 nt, synthetic construct
  source 1..37: mol_type = other RNA
attgctccttacgaggagacaagagcaacagtgctgt

SEQ ID NO: 2394 - RNA, 37 nt, synthetic construct
  source 1..37: mol_type = other RNA
attgctccttacgaggagacctccaggccacagcact

SEQ ID NO: 2395 - RNA, 37 nt, synthetic construct
  source 1..37: mol_type = other RNA
attgctccttacgaggagacttgctccaggccacagc

SEQ ID NO: 2396 - RNA, 37 nt, synthetic construct
  source 1..37: mol_type = other RNA
attgctccttacgaggagacgttgctccaggccacag

SEQ ID NO: 2397 - RNA, 37 nt, synthetic construct
  source 1..37: mol_type = other RNA
attgctccttacgaggagaccacatgcaaagtcagat

SEQ ID NO: 2398 - RNA, 37 nt, synthetic construct
  source 1..37: mol_type = other RNA
attgctccttacgaggagacgcacatgcaaagtcaga

SEQ ID NO: 2399 - RNA, 37 nt, synthetic construct
  source 1..37: mol_type = other RNA
attgctccttacgaggagacgcatgtgcaaacgcctt

SEQ ID NO: 2400 - RNA, 37 nt, synthetic construct
  source 1..37: mol_type = other RNA
attgctccttacgaggagacaaggcgtttgcacatgc

SEQ ID NO: 2401 - RNA, 37 nt, synthetic construct
  source 1..37: mol_type = other RNA
attgctccttacgaggagaccatgtgcaaacgccttc

SEQ ID NO: 2402 - RNA, 37 nt, synthetic construct
  source 1..37: mol_type = other RNA
attgctccttacgaggagacttgaaggcgtttgcaca

SEQ ID NO: 2403 - RNA, 37 nt, synthetic construct
  source 1..37: mol_type = other RNA
attgctccttacgaggagacaacaacagcattattcc

SEQ ID NO: 2404 - RNA, 37 nt, synthetic construct
  source 1..37: mol_type = other RNA
attgctccttacgaggagactggaataatgctgttgt

SEQ ID NO: 2405 - RNA, 37 nt, synthetic construct
  source 1..37: mol_type = other RNA
attgctccttacgaggagacttccagaagacaccttc

SEQ ID NO: 2406 - RNA, 37 nt, synthetic construct
  source 1..37: mol_type = other RNA
attgctccttacgaggagaccagaagacaccttcttc

SEQ ID NO: 2407 - RNA, 37 nt, synthetic construct
  source 1..37: mol_type = other RNA
attgctccttacgaggagaccctgggctggggaagaa

SEQ ID NO: 2408 - RNA, 37 nt, synthetic construct
  source 1..37: mol_type = other RNA
attgctccttacgaggagacttccccagcccaggtaa

SEQ ID NO: 2409 - RNA, 37 nt, synthetic construct
  source 1..37: mol_type = other RNA
attgctccttacgaggagaccccagcccaggtaaggg

SEQ ID NO: 2410 - RNA, 37 nt, synthetic construct
  source 1..37: mol_type = other RNA
attgctccttacgaggagactaaaaggaaaaacagac

SEQ ID NO: 2411 - RNA, 37 nt, synthetic construct
  source 1..37: mol_type = other RNA
attgctccttacgaggagacctaaaaggaaaaacaga

SEQ ID NO: 2412 - RNA, 37 nt, synthetic construct
  source 1..37: mol_type = other RNA
attgctccttacgaggagacttccttttagaaagttc

SEQ ID NO: 2413 - RNA, 37 nt, synthetic construct
  source 1..37: mol_type = other RNA
attgctccttacgaggagactccttttagaaagttcc

SEQ ID NO: 2414 - RNA, 37 nt, synthetic construct
  source 1..37: mol_type = other RNA
attgctccttacgaggagacccttttagaaagttcct

SEQ ID NO: 2415 - RNA, 37 nt, synthetic construct
  source 1..37: mol_type = other RNA
attgctccttacgaggagaccttttagaaagttcctg

SEQ ID NO: 2416 - RNA, 37 nt, synthetic construct
  source 1..37: mol_type = other RNA
attgctccttacgaggagactagaaagttcctgtgat

SEQ ID NO: 2417 - RNA, 37 nt, synthetic construct
  source 1..37: mol_type = other RNA
attgctccttacgaggagacagaaagttcctgtgatg

SEQ ID NO: 2418 - RNA, 37 nt, synthetic construct
  source 1..37: mol_type = other RNA
attgctccttacgaggagacgaaagttcctgtgatgt

SEQ ID NO: 2419 - RNA, 37 nt, synthetic construct
  source 1..37: mol_type = other RNA
attgctccttacgaggagacacatcacaggaactttc

SEQ ID NO: 2420 - RNA, 37 nt, synthetic construct
  source 1..37: mol_type = other RNA
attgctccttacgaggagacctgtgatgtcaagctgg

SEQ ID NO: 2421 - RNA, 37 nt, synthetic construct
  source 1..37: mol_type = other RNA
attgctccttacgaggagactcgaccagcttgacatc

SEQ ID NO: 2422 - RNA, 37 nt, synthetic construct
  source 1..37: mol_type = other RNA
attgctccttacgaggagacctcgaccagcttgacat

SEQ ID NO: 2423 - RNA, 37 nt, synthetic construct
  source 1..37: mol_type = other RNA
attgctccttacgaggagactctcgaccagcttgaca

SEQ ID NO: 2424 - RNA, 37 nt, synthetic construct
  source 1..37: mol_type = other RNA
attgctccttacgaggagacaaagcttttctcgacca

SEQ ID NO: 2425 - RNA, 37 nt, synthetic construct
  source 1..37: mol_type = other RNA
attgctccttacgaggagaccaaagcttttctcgacc

SEQ ID NO: 2426 - RNA, 37 nt, synthetic construct
  source 1..37: mol_type = other RNA
attgctccttacgaggagaccctgtttcaaagctttt

SEQ ID NO: 2427 - RNA, 37 nt, synthetic construct
  source 1..37: mol_type = other RNA
attgctccttacgaggagacgaaacaggtaagacagg

SEQ ID NO: 2428 - RNA, 37 nt, synthetic construct
  source 1..37: mol_type = other RNA
attgctccttacgaggagacaaacaggtaagacaggg

SEQ ID NO: 2429 - RNA, 98 nt, synthetic construct
  source 1..98: mol_type = other RNA
tggggcagttggttgcccttagcctgaggcatttattgcactcgggaagtaccatttctcagaaatggtacatccaactctaggcgcccgctaagttc

SEQ ID NO: 2430 - RNA, 98 nt, synthetic construct
  source 1..98: mol_type = other RNA
tggggcagttggttgcccttagcctgaggcatttattgcactcgggaagtaccatttctcagaaatggtacatccaaccccgggtaagcctgtctgct

SEQ ID NO: 2431 - RNA, 98 nt, synthetic construct
  source 1..98: mol_type = other RNA
tggggcagttggttgcccttagcctgaggcatttattgcactcgggaagtaccatttctcagaaatggtacatccaaccgtgctgtttcctccccacg

SEQ ID NO: 2432 - RNA, 98 nt, synthetic construct
  source 1..98: mol_type = other RNA
tggggcagttggttgcccttagcctgaggcatttattgcactcgggaagtaccatttctcagaaatggtacatccaacgtgccttagtttcttcatct

SEQ ID NO: 2433 - RNA, 98 nt, synthetic construct
  source 1..98: mol_type = other RNA
tggggcagttggttgcccttagcctgaggcatttattgcactcgggaagtaccatttctcagaaatggtacatccaacgggggcgggggggagaaaaa

SEQ ID NO: 2434 - RNA, 98 nt, synthetic construct
  source 1..98: mol_type = other RNA
tggggcagttggttgcccttagcctgaggcatttattgcactcgggaagtaccatttctcagaaatggtacatccaacgcgccctccgatctggggtg

SEQ ID NO: 2435 - protein, 448 aa, synthetic construct
MSVLTRKVQLIPVGDKEERDRVYKYLRDGIEAQNRAMNLYMSGLYFAAINEASKEDRKELNQLYSRIATSSKGSAYTTDIEFPTGLASTSTLSMAVRQDFTKSLKDGLMYGRVSLPTYRKDNPLFVDVRFVALRGTKQKYNGLYHEYKSHTEFLDNLYSSDLKVYIKFANDITFQVIFGNPRKSSALRSEFQNIFEEYYKVCQSSIQFSGTKIILNMAMDIPDKEIELDEDVCVGVDLGIAIPAVCALNKNRYSRVSIGSKEDFLRVRTKIRNQRKRLQTNLKSSNGGHGRKKKMKPMDRFRDYEANWVQNYNHYVSRQVVDFAVKNKAKYINLENLEGIRDDVKNEWLLSNWSYYQLQQYITYKAKTYGIEVRKINPYHTSQRCSCCGYEDAGNRPKKEKGQAYFKCLKCGEEMNADFNAARNIAMSTEFQSGKKTKKQKKEQHENK

SEQ ID NO: 2436 - RNA, 89 nt, synthetic construct
  source 1..89: mol_type = other RNA
  modified_base 1: mod_base = OTHER; note = 2'O-methyl adenosine phosphorothioate
  modified_base 2: mod_base = OTHER; note = 2'O-methyl cytidine phosphorothioate
  modified_base 3: mod_base = OTHER; note = 2'O-methyl adenosine phosphorothioate
  modified_base 87: mod_base = OTHER; note = 2'O-methyl uridine phosphorothioate
  modified_base 88: mod_base = OTHER; note = 2'O-methyl uridine phosphorothioate
  modified_base 89: mod_base = OTHER; note = 2'O-methyl cytidine
acagcttatttggaagctgaaatgtgaggtttataacactcacaagaatcctgaaaaaggatgccaaacctcgcgctactctctctttc

SEQ ID NO: 2437 - RNA, 89 nt, synthetic construct
  source 1..89: mol_type = other RNA
  modified_base 1: mod_base = OTHER; note = 2'O-methyl adenosine phosphorothioate
  modified_base 2: mod_base = OTHER; note = 2'O-methyl cytidine phosphorothioate
  modified_base 3: mod_base = OTHER; note = 2'O-methyl adenosine phosphorothioate
  modified_base 87: mod_base = OTHER; note = 2'O-methyl adenosine phosphorothioate
  modified_base 88: mod_base = OTHER; note = 2'O-methyl uridine phosphorothioate
  modified_base 89: mod_base = OTHER; note = 2'O-methyl uridine
acagcttatttggaagctgaaatgtgaggtttataacactcacaagaatcctgaaaaaggatgccaaacggtttcatccatccgacatt

SEQ ID NO: 2438 - RNA, 89 nt, synthetic construct
  source 1..89: mol_type = other RNA
  modified_base 1: mod_base = OTHER; note = 2'O-methyl adenosine phosphorothioate
  modified_base 2: mod_base = OTHER; note = 2'O-methyl cytidine phosphorothioate
  modified_base 3: mod_base = OTHER; note = 2'O-methyl adenosine phosphorothioate
  modified_base 87: mod_base = OTHER; note = 2'O-methyl cytidine phosphorothioate
  modified_base 88: mod_base = OTHER; note = 2'O-methyl cytidine phosphorothioate
  modified_base 89: mod_base = OTHER; note = 2'O-methyl adenosine
acagcttatttggaagctgaaatgtgaggtttataacactcacaagaatcctgaaaaaggatgccaaacctacactgaattcaccccca

SEQ ID NO: 2439 - RNA, 89 nt, synthetic construct
  source 1..89: mol_type = other RNA
  modified_base 1: mod_base = OTHER; note = 2'O-methyl adenosine phosphorothioate
  modified_base 2: mod_base = OTHER; note = 2'O-methyl cytidine phosphorothioate
  modified_base 3: mod_base = OTHER; note = 2'O-methyl adenosine phosphorothioate
  modified_base 87: mod_base = OTHER; note = 2'O-methyl adenosine phosphorothioate
  modified_base 88: mod_base = OTHER; note = 2'O-methyl adenosine phosphorothioate
  modified_base 89: mod_base = OTHER; note = 2'O-methyl uridine
acagcttatttggaagctgaaatgtgaggtttataacactcacaagaatcctgaaaaaggatgccaaactctcttgtactacactgaat

SEQ ID NO: 2440 - RNA, 89 nt, synthetic construct
  source 1..89: mol_type = other RNA
  modified_base 1: mod_base = OTHER; note = 2'O-methyl adenosine phosphorothioate
  modified_base 2: mod_base = OTHER; note = 2'O-methyl cytidine phosphorothioate
  modified_base 3: mod_base = OTHER; note = 2'O-methyl adenosine phosphorothioate
  modified_base 87: mod_base = OTHER; note = 2'O-methyl adenosine phosphorothioate
  modified_base 88: mod_base = OTHER; note = 2'O-methyl guanosine phosphorothioate
  modified_base 89: mod_base = OTHER; note = 2'O-methyl adenosine
acagcttatttggaagctgaaatgtgaggtttataacactcacaagaatcctgaaaaaggatgccaaacctcacgtcatccagcagaga

SEQ ID NO: 2441 - RNA, 89 nt, synthetic construct
  source 1..89: mol_type = other RNA
  modified_base 1: mod_base = OTHER; note = 2'O-methyl adenosine phosphorothioate
  modified_base 2: mod_base = OTHER; note = 2'O-methyl cytidine phosphorothioate
  modified_base 3: mod_base = OTHER; note = 2'O-methyl adenosine phosphorothioate
  modified_base 87: mod_base = OTHER; note = 2'O-methyl uridine phosphorothioate
  modified_base 88: mod_base = OTHER; note = 2'O-methyl cytidine phosphorothioate
  modified_base 89: mod_base = OTHER; note = 2'O-methyl cytidine
acagcttatttggaagctgaaatgtgaggtttataacactcacaagaatcctgaaaaaggatgccaaactgtctgggtttcatccatcc

SEQ ID NO: 2442 - RNA, 89 nt, synthetic construct
  source 1..89: mol_type = other RNA
  modified_base 1: mod_base = OTHER; note = 2'O-methyl adenosine phosphorothioate
  modified_base 2: mod_base = OTHER; note = 2'O-methyl cytidine phosphorothioate
  modified_base 3: mod_base = OTHER; note = 2'O-methyl adenosine phosphorothioate
  modified_base 87: mod_base = OTHER; note = 2'O-methyl guanosine phosphorothioate
  modified_base 88: mod_base = OTHER; note = 2'O-methyl uridine phosphorothioate
  modified_base 89: mod_base = OTHER; note = 2'O-methyl guanosine
acagcttatttggaagctgaaatgtgaggtttataacactcacaagaatcctgaaaaaggatgccaaaccctgccgtgtgaaccatgtg

SEQ ID NO: 2443 - RNA, 89 nt, synthetic construct
  source 1..89: mol_type = other RNA
  modified_base 1: mod_base = OTHER; note = 2'O-methyl adenosine phosphorothioate
  modified_base 2: mod_base = OTHER; note = 2'O-methyl cytidine phosphorothioate
  modified_base 3: mod_base = OTHER; note = 2'O-methyl adenosine phosphorothioate
  modified_base 87: mod_base = OTHER; note = 2'O-methyl uridine phosphorothioate
  modified_base 88: mod_base = OTHER; note = 2'O-methyl adenosine phosphorothioate
  modified_base 89: mod_base = OTHER; note = 2'O-methyl adenosine
acagcttatttggaagctgaaatgtgaggtttataacactcacaagaatcctgaaaaaggatgccaaactcacagcccaagatagttaa

SEQ ID NO: 2444 - RNA, 89 nt, synthetic construct
  source 1..89: mol_type = other RNA
  modified_base 1: mod_base = OTHER; note = 2'O-methyl adenosine phosphorothioate
  modified_base 2: mod_base = OTHER; note = 2'O-methyl cytidine phosphorothioate
  modified_base 3: mod_base = OTHER; note = 2'O-methyl adenosine phosphorothioate
  modified_base 87: mod_base = OTHER; note = 2'O-methyl guanosine phosphorothioate
  modified_base 88: mod_base = OTHER; note = 2'O-methyl adenosine phosphorothioate
  modified_base 89: mod_base = OTHER; note = 2'O-methyl uridine
acagcttatttggaagctgaaatgtgaggtttataacactcacaagaatcctgaaaaaggatgccaaacactttgtcacagcccaagat

SEQ ID NO: 2445 - RNA, 89 nt, synthetic construct
  source 1..89: mol_type = other RNA
  modified_base 1: mod_base = OTHER; note = 2'O-methyl adenosine phosphorothioate
  modified_base 2: mod_base = OTHER; note = 2'O-methyl cytidine phosphorothioate
  modified_base 3: mod_base = OTHER; note = 2'O-methyl adenosine phosphorothioate
  modified_base 87: mod_base = OTHER; note = 2'O-methyl cytidine phosphorothioate
  modified_base 88: mod_base = OTHER; note = 2'O-methyl guanosine phosphorothioate
  modified_base 89: mod_base = OTHER; note = 2'O-methyl adenosine
acagcttatttggaagctgaaatgtgaggtttataacactcacaagaatcctgaaaaaggatgccaaactctgggtttcatccatccga

SEQ ID NO: 2446 - RNA, 89 nt, synthetic construct
  source 1..89: mol_type = other RNA
  modified_base 1: mod_base = OTHER; note = 2'O-methyl adenosine phosphorothioate
  modified_base 2: mod_base = OTHER; note = 2'O-methyl cytidine phosphorothioate
  modified_base 3: mod_base = OTHER; note = 2'O-methyl adenosine phosphorothioate
  modified_base 87: mod_base = OTHER; note = 2'O-methyl adenosine phosphorothioate
  modified_base 88: mod_base = OTHER; note = 2'O-methyl cytidine phosphorothioate
  modified_base 89: mod_base = OTHER; note = 2'O-methyl adenosine
acagcttatttggaagctgaaatgtgaggtttataacactcacaagaatcctgaaaaaggatgccaaacaaccatgtgactttgtcaca

SEQ ID NO: 2447 - RNA, 89 nt, synthetic construct
  source 1..89: mol_type = other RNA
  modified_base 1: mod_base = OTHER; note = 2'O-methyl adenosine phosphorothioate
  modified_base 2: mod_base = OTHER; note = 2'O-methyl cytidine phosphorothioate
  modified_base 3: mod_base = OTHER; note = 2'O-methyl adenosine phosphorothioate
  modified_base 87: mod_base = OTHER; note = 2'O-methyl adenosine phosphorothioate
  modified_base 88: mod_base = OTHER; note = 2'O-methyl uridine phosphorothioate
  modified_base 89: mod_base = OTHER; note = 2'O-methyl uridine
acagcttatttggaagctgaaatgtgaggtttataacactcacaagaatcctgaaaaaggatgccaaacaatgctccactttttcaatt

SEQ ID NO: 2448 - RNA, 89 nt, synthetic construct
  source 1..89: mol_type = other RNA
  modified_base 1: mod_base = OTHER; note = 2'O-methyl adenosine phosphorothioate
  modified_base 2: mod_base = OTHER; note = 2'O-methyl cytidine phosphorothioate
  modified_base 3: mod_base = OTHER; note = 2'O-methyl adenosine phosphorothioate
  modified_base 87: mod_base = OTHER; note = 2'O-methyl guanosine phosphorothioate
  modified_base 88: mod_base = OTHER; note = 2'O-methyl guanosine phosphorothioate
  modified_base 89: mod_base = OTHER; note = 2'O-methyl adenosine
acagcttatttggaagctgaaatgtgaggtttataacactcacaagaatcctgaaaaaggatgccaaacactttccattctctgctgga

SEQ ID NO: 2449 - RNA, 89 nt, synthetic construct
  source 1..89: mol_type = other RNA
  modified_base 1: mod_base = OTHER; note = 2'O-methyl adenosine phosphorothioate
  modified_base 2: mod_base = OTHER; note = 2'O-methyl cytidine phosphorothioate
  modified_base 3: mod_base = OTHER; note = 2'O-methyl adenosine phosphorothioate
  modified_base 87: mod_base = OTHER; note = 2'O-methyl adenosine phosphorothioate
  modified_base 88: mod_base = OTHER; note = 2'O-methyl cytidine phosphorothioate
  modified_base 89: mod_base = OTHER; note = 2'O-methyl adenosine
acagcttatttggaagctgaaatgtgaggtttataacactcacaagaatcctgaaaaaggatgccaaacacaaagtcacatggttcaca

SEQ ID NO: 2450 - RNA, 89 nt, synthetic construct
  source 1..89: mol_type = other RNA
  modified_base 1: mod_base = OTHER; note = 2'O-methyl adenosine phosphorothioate
  modified_base 2: mod_base = OTHER; note = 2'O-methyl cytidine phosphorothioate
  modified_base 3: mod_base = OTHER; note = 2'O-methyl adenosine phosphorothioate
  modified_base 87: mod_base = OTHER; note = 2'O-methyl adenosine phosphorothioate
  modified_base 88: mod_base = OTHER; note = 2'O-methyl cytidine phosphorothioate
  modified_base 89: mod_base = OTHER; note = 2'O-methyl cytidine
acagcttatttggaagctgaaatgtgaggtttataacactcacaagaatcctgaaaaaggatgccaaacgtacaagagatagaaagacc

SEQ ID NO: 2451 - RNA, 89 nt, synthetic construct
  source 1..89: mol_type = other RNA
  modified_base 1: mod_base = OTHER; note = 2'O-methyl adenosine phosphorothioate
  modified_base 2: mod_base = OTHER; note = 2'O-methyl cytidine phosphorothioate
  modified_base 3: mod_base = OTHER; note = 2'O-methyl adenosine phosphorothioate
  modified_base 87: mod_base = OTHER; note = 2'O-methyl adenosine phosphorothioate
  modified_base 88: mod_base = OTHER; note = 2'O-methyl cytidine phosphorothioate
  modified_base 89: mod_base = OTHER; note = 2'O-methyl cytidine
acagcttatttggaagctgaaatgtgaggtttataacactcacaagaatcctgaaaaaggatgccaaacctggatgacgtgagtaaacc

SEQ ID NO: 2452 - RNA, 89 nt, synthetic construct
  source 1..89: mol_type = other RNA
  modified_base 1: mod_base = OTHER; note = 2'O-methyl adenosine phosphorothioate
  modified_base 2: mod_base = OTHER; note = 2'O-methyl cytidine phosphorothioate
  modified_base 3: mod_base = OTHER; note = 2'O-methyl adenosine phosphorothioate
  modified_base 87: mod_base = OTHER; note = 2'O-methyl uridine phosphorothioate
  modified_base 88: mod_base = OTHER; note = 2'O-methyl guanosine phosphorothioate
  modified_base 89: mod_base = OTHER; note = 2'O-methyl adenosine
acagcttatttggaagctgaaatgtgaggtttataacactcacaagaatcctgaaaaaggatgccaaactcacaaagtaaggattctga

SEQ ID NO: 2453 - RNA, 89 nt, synthetic construct
  source 1..89: mol_type = other RNA
  modified_base 1: mod_base = OTHER; note = 2'O-methyl adenosine phosphorothioate
  modified_base 2: mod_base = OTHER; note = 2'O-methyl cytidine phosphorothioate
  modified_base 3: mod_base = OTHER; note = 2'O-methyl adenosine phosphorothioate
  modified_base 87: mod_base = OTHER; note = 2'O-methyl adenosine phosphorothioate
  modified_base 88: mod_base = OTHER; note = 2'O-methyl guanosine phosphorothioate
  modified_base 89: mod_base = OTHER; note = 2'O-methyl uridine
acagcttatttggaagctgaaatgtgaggtttataacactcacaagaatcctgaaaaaggatgccaaactggacttcaagagcaacagt

SEQ ID NO: 2454 - RNA, 89 nt, synthetic construct
  source 1..89: mol_type = other RNA
  modified_base 1: mod_base = OTHER; note = 2'O-methyl adenosine phosphorothioate
  modified_base 2: mod_base = OTHER; note = 2'O-methyl cytidine phosphorothioate
  modified_base 3: mod_base = OTHER; note = 2'O-methyl adenosine phosphorothioate
  modified_base 87: mod_base = OTHER; note = 2'O-methyl uridine phosphorothioate
  modified_base 88: mod_base = OTHER; note = 2'O-methyl cytidine phosphorothioate
  modified_base 89: mod_base = OTHER; note = 2'O-methyl adenosine
acagcttatttggaagctgaaatgtgaggtttataacactcacaagaatcctgaaaaaggatgccaaacattctcaaacaaatgtgtca

SEQ ID NO: 2455 - RNA, 89 nt, synthetic construct
  source 1..89: mol_type = other RNA
  modified_base 1: mod_base = OTHER; note = 2'O-methyl adenosine phosphorothioate
  modified_base 2: mod_base = OTHER; note = 2'O-methyl cytidine phosphorothioate
  modified_base 3: mod_base = OTHER; note = 2'O-methyl adenosine phosphorothioate
  modified_base 87: mod_base = OTHER; note = 2'O-methyl guanosine phosphorothioate
  modified_base 88: mod_base = OTHER; note = 2'O-methyl cytidine phosphorothioate
  modified_base 89: mod_base = OTHER; note = 2'O-methyl cytidine
acagcttatttggaagctgaaatgtgaggtttataacactcacaagaatcctgaaaaaggatgccaaacactttgcatgtgcaaacgcc

SEQ ID NO: 2456 - RNA, 89 nt, synthetic construct
  source 1..89: mol_type = other RNA
  modified_base 1: mod_base = OTHER; note = 2'O-methyl adenosine phosphorothioate
  modified_base 2: mod_base = OTHER; note = 2'O-methyl cytidine phosphorothioate
  modified_base 3: mod_base = OTHER; note = 2'O-methyl adenosine phosphorothioate
  modified_base 87: mod_base = OTHER; note = 2'O-methyl adenosine phosphorothioate
  modified_base 88: mod_base = OTHER; note = 2'O-methyl guanosine phosphorothioate
  modified_base 89: mod_base = OTHER; note = 2'O-methyl cytidine
acagcttatttggaagctgaaatgtgaggtttataacactcacaagaatcctgaaaaaggatgccaaaccaaacgccttcaacaacagc

SEQ ID NO: 2457 - RNA, 89 nt, synthetic construct
  source 1..89: mol_type = other RNA
  modified_base 1: mod_base = OTHER; note = 2'O-methyl adenosine phosphorothioate
  modified_base 2: mod_base = OTHER; note = 2'O-methyl cytidine phosphorothioate
  modified_base 3: mod_base = OTHER; note = 2'O-methyl adenosine phosphorothioate
  modified_base 87: mod_base = OTHER; note = 2'O-methyl uridine phosphorothioate
  modified_base 88: mod_base = OTHER; note = 2'O-methyl guanosine phosphorothioate
  modified_base 89: mod_base = OTHER; note = 2'O-methyl uridine
acagcttatttggaagctgaaatgtgaggtttataacactcacaagaatcctgaaaaaggatgccaaactatatcacagacaaaactgt

SEQ ID NO: 2458 - RNA, 89 nt, synthetic construct
  source 1..89: mol_type = other RNA
  modified_base 1: mod_base = OTHER; note = 2'O-methyl adenosine phosphorothioate
  modified_base 2: mod_base = OTHER; note = 2'O-methyl cytidine phosphorothioate
  modified_base 3: mod_base = OTHER; note = 2'O-methyl adenosine phosphorothioate
  modified_base 87: mod_base = OTHER; note = 2'O-methyl guanosine phosphorothioate
  modified_base 88: mod_base = OTHER; note = 2'O-methyl uridine phosphorothioate
  modified_base 89: mod_base = OTHER; note = 2'O-methyl cytidine
acagcttatttggaagctgaaatgtgaggtttataacactcacaagaatcctgaaaaaggatgccaaacaatccagtgacaagtctgtc

SEQ ID NO: 2459 - RNA, 89 nt, synthetic construct
  source 1..89: mol_type = other RNA
  modified_base 1: mod_base = OTHER; note = 2'O-methyl adenosine phosphorothioate
  modified_base 2: mod_base = OTHER; note = 2'O-methyl cytidine phosphorothioate
  modified_base 3: mod_base = OTHER; note = 2'O-methyl adenosine phosphorothioate
  modified_base 87: mod_base = OTHER; note = 2'O-methyl adenosine phosphorothioate
  modified_base 88: mod_base = OTHER; note = 2'O-methyl adenosine phosphorothioate
  modified_base 89: mod_base = OTHER; note = 2'O-methyl adenosine
acagcttatttggaagctgaaatgtgaggtttataacactcacaagaatcctgaaaaaggatgccaaacatgtgtatatcacagacaaa

SEQ ID NO: 2460 - RNA, 89 nt, synthetic construct
  source 1..89: mol_type = other RNA
  modified_base 1: mod_base = OTHER; note = 2'O-methyl adenosine phosphorothioate
  modified_base 2: mod_base = OTHER; note = 2'O-methyl cytidine phosphorothioate
  modified_base 3: mod_base = OTHER; note = 2'O-methyl adenosine phosphorothioate
  modified_base 87: mod_base = OTHER; note = 2'O-methyl adenosine phosphorothioate
  modified_base 88: mod_base = OTHER; note = 2'O-methyl adenosine phosphorothioate
  modified_base 89: mod_base = OTHER; note = 2'O-methyl cytidine
acagcttatttggaagctgaaatgtgaggtttataacactcacaagaatcctgaaaaaggatgccaaaccatgtgcaaacgccttcaac

SEQ ID NO: 2461 - RNA, 89 nt, synthetic construct
  source 1..89: mol_type = other RNA
  modified_base 1: mod_base = OTHER; note = 2'O-methyl adenosine phosphorothioate
  modified_base 2: mod_base = OTHER; note = 2'O-methyl cytidine phosphorothioate
  modified_base 3: mod_base = OTHER; note = 2'O-methyl adenosine phosphorothioate
  modified_base 87: mod_base = OTHER; note = 2'O-methyl cytidine phosphorothioate
  modified_base 88: mod_base = OTHER; note = 2'O-methyl uridine phosphorothioate
  modified_base 89: mod_base = OTHER; note = 2'O-methyl adenosine
acagcttatttggaagctgaaatgtgaggtttataacactcacaagaatcctgaaaaaggatgccaaactcacagacaaaactgtgcta

SEQ ID NO: 2462 - RNA, 89 nt, synthetic construct
  source 1..89: mol_type = other RNA
  modified_base 1: mod_base = OTHER; note = 2'O-methyl adenosine phosphorothioate
  modified_base 2: mod_base = OTHER; note = 2'O-methyl cytidine phosphorothioate
  modified_base 3: mod_base = OTHER; note = 2'O-methyl adenosine phosphorothioate
  modified_base 87: mod_base = OTHER; note = 2'O-methyl uridine phosphorothioate
  modified_base 88: mod_base = OTHER; note = 2'O-methyl guanosine phosphorothioate
  modified_base 89: mod_base = OTHER; note = 2'O-methyl cytidine
acagcttatttggaagctgaaatgtgaggtttataacactcacaagaatcctgaaaaaggatgccaaactatcacagacaaaactgtgc

SEQ ID NO: 2463 - RNA, 89 nt, synthetic construct
  source 1..89: mol_type = other RNA
  modified_base 1: mod_base = OTHER; note = 2'O-methyl adenosine phosphorothioate
  modified_base 2: mod_base = OTHER; note = 2'O-methyl cytidine phosphorothioate
  modified_base 3: mod_base = OTHER; note = 2'O-methyl adenosine phosphorothioate
  modified_base 87: mod_base = OTHER; note = 2'O-methyl uridine phosphorothioate
  modified_base 88: mod_base = OTHER; note = 2'O-methyl uridine phosphorothioate
  modified_base 89: mod_base = OTHER; note = 2'O-methyl uridine
acagcttatttggaagctgaaatgtgaggtttataacactcacaagaatcctgaaaaaggatgccaaactctgcctattcaccgatttt

SEQ ID NO: 2464 - RNA, 89 nt, synthetic construct
  source 1..89: mol_type = other RNA
  modified_base 1: mod_base = OTHER; note = 2'O-methyl adenosine phosphorothioate
  modified_base 2: mod_base = OTHER; note = 2'O-methyl cytidine phosphorothioate
  modified_base 3: mod_base = OTHER; note = 2'O-methyl adenosine phosphorothioate
  modified_base 87: mod_base = OTHER; note = 2'O-methyl uridine phosphorothioate
  modified_base 88: mod_base = OTHER; note = 2'O-methyl guanosine phosphorothioate
  modified_base 89: mod_base = OTHER; note = 2'O-methyl adenosine
acagcttatttggaagctgaaatgtgaggtttataacactcacaagaatcctgaaaaaggatgccaaacgcctggagcaacaaatctga

SEQ ID NO: 2465 - RNA, 89 nt, synthetic construct
  source 1..89: mol_type = other RNA
  modified_base 1: mod_base = OTHER; note = 2'O-methyl adenosine phosphorothioate
  modified_base 2: mod_base = OTHER; note = 2'O-methyl cytidine phosphorothioate
  modified_base 3: mod_base = OTHER; note = 2'O-methyl adenosine phosphorothioate
  modified_base 87: mod_base = OTHER; note = 2'O-methyl adenosine phosphorothioate
  modified_base 88: mod_base = OTHER; note = 2'O-methyl adenosine phosphorothioate
  modified_base 89: mod_base = OTHER; note = 2'O-methyl uridine
acagcttatttggaagctgaaatgtgaggtttataacactcacaagaatcctgaaaaaggatgccaaacccagctgagagactctaaat

SEQ ID NO: 2466 - RNA, 89 nt, synthetic construct
  source 1..89: mol_type = other RNA
  modified_base 1: mod_base = OTHER; note = 2'O-methyl adenosine phosphorothioate
  modified_base 2: mod_base = OTHER; note = 2'O-methyl cytidine phosphorothioate
  modified_base 3: mod_base = OTHER; note = 2'O-methyl adenosine phosphorothioate
  modified_base 87: mod_base = OTHER; note = 2'O-methyl adenosine phosphorothioate
  modified_base 88: mod_base = OTHER; note = 2'O-methyl uridine phosphorothioate
  modified_base 89: mod_base = OTHER; note = 2'O-methyl uridine
acagcttatttggaagctgaaatgtgaggtttataacactcacaagaatcctgaaaaaggatgccaaaccctattcaccgattttgatt

SEQ ID NO: 2467 - RNA, 89 nt, synthetic construct
  source 1..89: mol_type = other RNA
  modified_base 1: mod_base = OTHER; note = 2'O-methyl adenosine phosphorothioate
  modified_base 2: mod_base = OTHER; note = 2'O-methyl cytidine phosphorothioate
  modified_base 3: mod_base = OTHER; note = 2'O-methyl adenosine phosphorothioate
  modified_base 87: mod_base = OTHER; note = 2'O-methyl guanosine phosphorothioate
  modified_base 88: mod_base = OTHER; note = 2'O-methyl guanosine phosphorothioate
  modified_base 89: mod_base = OTHER; note = 2'O-methyl adenosine
acagcttatttggaagctgaaatgtgaggtttataacactcacaagaatcctgaaaaaggatgccaaacctagacatgaggtctatgga

SEQ ID NO: 2468 - RNA, 89 nt, synthetic construct
  source 1..89: mol_type = other RNA
  modified_base 1: mod_base = OTHER; note = 2'O-methyl adenosine phosphorothioate
  modified_base 2: mod_base = OTHER; note = 2'O-methyl cytidine phosphorothioate
  modified_base 3: mod_base = OTHER; note = 2'O-methyl adenosine phosphorothioate
  modified_base 87: mod_base = OTHER; note = 2'O-methyl uridine phosphorothioate
  modified_base 88: mod_base = OTHER; note = 2'O-methyl guanosine phosphorothioate
  modified_base 89: mod_base = OTHER; note = 2'O-methyl cytidine
acagcttatttggaagctgaaatgtgaggtttataacactcacaagaatcctgaaaaaggatgccaaacgacttcaagagcaacagtgc

SEQ ID NO: 2469 - RNA, 89 nt, synthetic construct
  source 1..89: mol_type = other RNA
  modified_base 1: mod_base = OTHER; note = 2'O-methyl adenosine phosphorothioate
  modified_base 2: mod_base = OTHER; note = 2'O-methyl cytidine phosphorothioate
  modified_base 3: mod_base = OTHER; note = 2'O-methyl adenosine phosphorothioate
  modified_base 87: mod_base = OTHER; note = 2'O-methyl adenosine phosphorothioate
  modified_base 88: mod_base = OTHER; note = 2'O-methyl uridine phosphorothioate
  modified_base 89: mod_base = OTHER; note = 2'O-methyl adenosine
acagcttatttggaagctgaaatgtgaggtttataacactcacaagaatcctgaaaaaggatgccaaacgcacagttttgtctgtgata

SEQ ID NO: 2470 - RNA, 89 nt, synthetic construct
  source 1..89: mol_type = other RNA
  modified_base 1: mod_base = OTHER; note = 2'O-methyl adenosine phosphorothioate
  modified_base 2: mod_base = OTHER; note = 2'O-methyl cytidine phosphorothioate
  modified_base 3: mod_base = OTHER; note = 2'O-methyl adenosine phosphorothioate
  modified_base 87: mod_base = OTHER; note = 2'O-methyl adenosine phosphorothioate
  modified_base 88: mod_base = OTHER; note = 2'O-methyl uridine phosphorothioate
  modified_base 89: mod_base = OTHER; note = 2'O-methyl adenosine
acagcttatttggaagctgaaatgtgaggtttataacactcacaagaatcctgaaaaaggatgccaaacagaatcaaaatcggtgaata

SEQ ID NO: 2471 - RNA, 89 nt, synthetic construct
  source 1..89: mol_type = other RNA
  modified_base 1: mod_base = OTHER; note = 2'O-methyl adenosine phosphorothioate
  modified_base 2: mod_base = OTHER; note = 2'O-methyl cytidine phosphorothioate
  modified_base 3: mod_base = OTHER; note = 2'O-methyl adenosine phosphorothioate
  modified_base 87: mod_base = OTHER; note = 2'O-methyl uridine phosphorothioate
  modified_base 88: mod_base = OTHER; note = 2'O-methyl uridine phosphorothioate
  modified_base 89: mod_base = OTHER; note = 2'O-methyl uridine
acagcttatttggaagctgaaatgtgaggtttataacactcacaagaatcctgaaaaaggatgccaaaccacatcagaatccttacttt

SEQ ID NO: 2472 - RNA, 89 nt, synthetic construct
  source 1..89: mol_type = other RNA
  modified_base 1: mod_base = OTHER; note = 2'O-methyl adenosine phosphorothioate
  modified_base 2: mod_base = OTHER; note = 2'O-methyl cytidine phosphorothioate
  modified_base 3: mod_base = OTHER; note = 2'O-methyl adenosine phosphorothioate
  modified_base 87: mod_base = OTHER; note = 2'O-methyl uridine phosphorothioate
  modified_base 88: mod_base = OTHER; note = 2'O-methyl cytidine phosphorothioate
  modified_base 89: mod_base = OTHER; note = 2'O-methyl cytidine
acagcttatttggaagctgaaatgtgaggtttataacactcacaagaatcctgaaaaaggatgccaaactgatatacacatcagaatcc

SEQ ID NO: 2473 - RNA, 89 nt, synthetic construct
  source 1..89: mol_type = other RNA
  modified_base 1: mod_base = OTHER; note = 2'O-methyl adenosine phosphorothioate
  modified_base 2: mod_base = OTHER; note = 2'O-methyl cytidine phosphorothioate
  modified_base 3: mod_base = OTHER; note = 2'O-methyl adenosine phosphorothioate
  modified_base 87: mod_base = OTHER; note = 2'O-methyl uridine phosphorothioate
  modified_base 88: mod_base = OTHER; note = 2'O-methyl cytidine phosphorothioate
  modified_base 89: mod_base = OTHER; note = 2'O-methyl adenosine
acagcttatttggaagctgaaatgtgaggtttataacactcacaagaatcctgaaaaaggatgccaaacacacatttgtttgagaatca

SEQ ID NO: 2474 - RNA, 89 nt, synthetic construct
  source 1..89: mol_type = other RNA
  modified_base 1: mod_base = OTHER; note = 2'O-methyl adenosine phosphorothioate
  modified_base 2: mod_base = OTHER; note = 2'O-methyl cytidine phosphorothioate
  modified_base 3: mod_base = OTHER; note = 2'O-methyl adenosine phosphorothioate
  modified_base 87: mod_base = OTHER; note = 2'O-methyl adenosine phosphorothioate
  modified_base 88: mod_base = OTHER; note = 2'O-methyl adenosine phosphorothioate
  modified_base 89: mod_base = OTHER; note = 2'O-methyl uridine
acagcttatttggaagctgaaatgtgaggtttataacactcacaagaatcctgaaaaaggatgccaaactgacacatttgtttgagaat

SEQ ID NO: 2475 - RNA, 89 nt, synthetic construct
  source 1..89: mol_type = other RNA
  modified_base 1: mod_base = OTHER; note = 2'O-methyl adenosine phosphorothioate
  modified_base 2: mod_base = OTHER; note = 2'O-methyl cytidine phosphorothioate
  modified_base 3: mod_base = OTHER; note = 2'O-methyl adenosine phosphorothioate
  modified_base 87: mod_base = OTHER; note = 2'O-methyl cytidine phosphorothioate
  modified_base 88: mod_base = OTHER; note = 2'O-methyl adenosine phosphorothioate
  modified_base 89: mod_base = OTHER; note = 2'O-methyl cytidine
acagcttatttggaagctgaaatgtgaggtttataacactcacaagaatcctgaaaaaggatgccaaacgagtctctcagctggtacac

SEQ ID NO: 2476 - RNA, 89 nt, synthetic construct
  source 1..89: mol_type = other RNA
  modified_base 1: mod_base = OTHER; note = 2'O-methyl adenosine phosphorothioate
  modified_base 2: mod_base = OTHER; note = 2'O-methyl cytidine phosphorothioate
  modified_base 3: mod_base = OTHER; note = 2'O-methyl adenosine phosphorothioate
  modified_base 87: mod_base = OTHER; note = 2'O-methyl adenosine phosphorothioate
  modified_base 88: mod_base = OTHER; note = 2'O-methyl cytidine phosphorothioate
  modified_base 89: mod_base = OTHER; note = 2'O-methyl uridine
acagcttatttggaagctgaaatgtgaggtttataacactcacaagaatcctgaaaaaggatgccaaacttgctccaggccacagcact

SEQ ID NO: 2477 - RNA, 89 nt, synthetic construct
  source 1..89: mol_type = other RNA
  modified_base 1: mod_base = OTHER; note = 2'O-methyl adenosine phosphorothioate
  modified_base 2: mod_base = OTHER; note = 2'O-methyl cytidine phosphorothioate
  modified_base 3: mod_base = OTHER; note = 2'O-methyl adenosine phosphorothioate
  modified_base 87: mod_base = OTHER; note = 2'O-methyl uridine phosphorothioate
  modified_base 88: mod_base = OTHER; note = 2'O-methyl uridine phosphorothioate
  modified_base 89: mod_base = OTHER; note = 2'O-methyl guanosine
acagcttatttggaagctgaaatgtgaggtttataacactcacaagaatcctgaaaaaggatgccaaaccacatgcaaagtcagatttg

SEQ ID NO: 2478 - RNA, 89 nt, synthetic construct
  source 1..89: mol_type = other RNA
  modified_base 1: mod_base = OTHER; note = 2'O-methyl adenosine phosphorothioate
  modified_base 2: mod_base = OTHER; note = 2'O-methyl cytidine phosphorothioate
  modified_base 3: mod_base = OTHER; note = 2'O-methyl adenosine phosphorothioate
  modified_base 87: mod_base = OTHER; note = 2'O-methyl guanosine phosphorothioate
  modified_base 88: mod_base = OTHER; note = 2'O-methyl uridine phosphorothioate
  modified_base 89: mod_base = OTHER; note = 2'O-methyl guanosine
acagcttatttggaagctgaaatgtgaggtttataacactcacaagaatcctgaaaaaggatgccaaactttgagaatcaaaatcggtg

SEQ ID NO: 2479 - RNA, 89 nt, synthetic construct
  source 1..89: mol_type = other RNA
  modified_base 1: mod_base = OTHER; note = 2'O-methyl adenosine phosphorothioate
  modified_base 2: mod_base = OTHER; note = 2'O-methyl cytidine phosphorothioate
  modified_base 3: mod_base = OTHER; note = 2'O-methyl adenosine phosphorothioate
  modified_base 87: mod_base = OTHER; note = 2'O-methyl cytidine phosphorothioate
  modified_base 88: mod_base = OTHER; note = 2'O-methyl uridine phosphorothioate
  modified_base 89: mod_base = OTHER; note = 2'O-methyl uridine
acagcttatttggaagctgaaatgtgaggtttataacactcacaagaatcctgaaaaaggatgccaaacatatacacatcagaatcctt

SEQ ID NO: 2480 - RNA, 89 nt, synthetic construct
  source 1..89: mol_type = other RNA
  modified_base 1: mod_base = OTHER; note = 2'O-methyl adenosine phosphorothioate
  modified_base 2: mod_base = OTHER; note = 2'O-methyl cytidine phosphorothioate
  modified_base 3: mod_base = OTHER; note = 2'O-methyl adenosine phosphorothioate
  modified_base 87: mod_base = OTHER; note = 2'O-methyl adenosine phosphorothioate
  modified_base 88: mod_base = OTHER; note = 2'O-methyl adenosine phosphorothioate
  modified_base 89: mod_base = OTHER; note = 2'O-methyl guanosine
acagcttatttggaagctgaaatgtgaggtttataacactcacaagaatcctgaaaaaggatgccaaacgaataatgctgttgttgaag

SEQ ID NO: 2481 - RNA, 89 nt, synthetic construct
  source 1..89: mol_type = other RNA
  modified_base 1: mod_base = OTHER; note = 2'O-methyl adenosine phosphorothioate
  modified_base 2: mod_base = OTHER; note = 2'O-methyl cytidine phosphorothioate
  modified_base 3: mod_base = OTHER; note = 2'O-methyl adenosine phosphorothioate
  modified_base 87: mod_base = OTHER; note = 2'O-methyl adenosine phosphorothioate
  modified_base 88: mod_base = OTHER; note = 2'O-methyl guanosine phosphorothioate
  modified_base 89: mod_base = OTHER; note = 2'O-methyl adenosine
acagcttatttggaagctgaaatgtgaggtttataacactcacaagaatcctgaaaaaggatgccaaactctgtgatatacacatcaga

SEQ ID NO: 2482 - RNA, 89 nt, synthetic construct
  source 1..89: mol_type = other RNA
  modified_base 1: mod_base = OTHER; note = 2'O-methyl adenosine phosphorothioate
  modified_base 2: mod_base = OTHER; note = 2'O-methyl cytidine phosphorothioate
  modified_base 3: mod_base = OTHER; note = 2'O-methyl adenosine phosphorothioate
  modified_base 87: mod_base = OTHER; note = 2'O-methyl adenosine phosphorothioate
  modified_base 88: mod_base = OTHER; note = 2'O-methyl adenosine phosphorothioate
  modified_base 89: mod_base = OTHER; note = 2'O-methyl adenosine
acagcttatttggaagctgaaatgtgaggtttataacactcacaagaatcctgaaaaaggatgccaaacatgtcaagctggtcgagaaa

SEQ ID NO: 2483 - RNA, 89 nt, synthetic construct
  source 1..89: mol_type = other RNA
  modified_base 1: mod_base = OTHER; note = 2'O-methyl adenosine phosphorothioate
  modified_base 2: mod_base = OTHER; note = 2'O-methyl cytidine phosphorothioate
  modified_base 3: mod_base = OTHER; note = 2'O-methyl adenosine phosphorothioate
  modified_base 87: mod_base = OTHER; note = 2'O-methyl guanosine phosphorothioate
  modified_base 88: mod_base = OTHER; note = 2'O-methyl uridine phosphorothioate
  modified_base 89: mod_base = OTHER; note = 2'O-methyl guanosine
acagcttatttggaagctgaaatgtgaggtttataacactcacaagaatcctgaaaaaggatgccaaacctcatgacgctgcggctgtg

SEQ ID NO: 2484 - RNA, 89 nt, synthetic construct
  source 1..89: mol_type = other RNA
  modified_base 1: mod_base = OTHER; note = 2'O-methyl adenosine phosphorothioate
  modified_base 2: mod_base = OTHER; note = 2'O-methyl cytidine phosphorothioate
  modified_base 3: mod_base = OTHER; note = 2'O-methyl adenosine phosphorothioate
  modified_base 87: mod_base = OTHER; note = 2'O-methyl cytidine phosphorothioate
  modified_base 88: mod_base = OTHER; note = 2'O-methyl guanosine phosphorothioate
  modified_base 89: mod_base = OTHER; note = 2'O-methyl guanosine
acagcttatttggaagctgaaatgtgaggtttataacactcacaagaatcctgaaaaaggatgccaaacatctgctcatgacgctgcgg

SEQ ID NO: 2485 - RNA, 89 nt, synthetic construct
  source 1..89: mol_type = other RNA
  modified_base 1: mod_base = OTHER; note = 2'O-methyl adenosine phosphorothioate
  modified_base 2: mod_base = OTHER; note = 2'O-methyl cytidine phosphorothioate
  modified_base 3: mod_base = OTHER; note = 2'O-methyl adenosine phosphorothioate
  modified_base 87: mod_base = OTHER; note = 2'O-methyl uridine phosphorothioate
  modified_base 88: mod_base = OTHER; note = 2'O-methyl cytidine phosphorothioate
  modified_base 89: mod_base = OTHER; note = 2'O-methyl cytidine
acagcttatttggaagctgaaatgtgaggtttataacactcacaagaatcctgaaaaaggatgccaaactgcttctgagctgggcatcc

SEQ ID NO: 2486 - RNA, 89 nt, synthetic construct
  source 1..89: mol_type = other RNA
  modified_base 1: mod_base = OTHER; note = 2'O-methyl adenosine phosphorothioate
  modified_base 2: mod_base = OTHER; note = 2'O-methyl cytidine phosphorothioate
  modified_base 3: mod_base = OTHER; note = 2'O-methyl adenosine phosphorothioate
  modified_base 87: mod_base = OTHER; note = 2'O-methyl cytidine phosphorothioate
  modified_base 88: mod_base = OTHER; note = 2'O-methyl adenosine phosphorothioate
  modified_base 89: mod_base = OTHER; note = 2'O-methyl uridine
acagcttatttggaagctgaaatgtgaggtttataacactcacaagaatcctgaaaaaggatgccaaacagctgggcatccgaaggcat

SEQ ID NO: 2487 - RNA, 89 nt, synthetic construct
  source 1..89: mol_type = other RNA
  modified_base 1: mod_base = OTHER; note = 2'O-methyl adenosine phosphorothioate
  modified_base 2: mod_base = OTHER; note = 2'O-methyl cytidine phosphorothioate
  modified_base 3: mod_base = OTHER; note = 2'O-methyl adenosine phosphorothioate
  modified_base 87: mod_base = OTHER; note = 2'O-methyl cytidine phosphorothioate
  modified_base 88: mod_base = OTHER; note = 2'O-methyl guanosine phosphorothioate
  modified_base 89: mod_base = OTHER; note = 2'O-methyl adenosine
acagcttatttggaagctgaaatgtgaggtttataacactcacaagaatcctgaaaaaggatgccaaaccttctgagctgggcatccga

SEQ ID NO: 2488 - RNA, 89 nt, synthetic construct
  source 1..89: mol_type = other RNA
  modified_base 1: mod_base = OTHER; note = 2'O-methyl adenosine phosphorothioate
  modified_base 2: mod_base = OTHER; note = 2'O-methyl cytidine phosphorothioate
  modified_base 3: mod_base = OTHER; note = 2'O-methyl adenosine phosphorothioate
  modified_base 87: mod_base = OTHER; note = 2'O-methyl guanosine phosphorothioate
  modified_base 88: mod_base = OTHER; note = 2'O-methyl cytidine phosphorothioate
  modified_base 89: mod_base = OTHER; note = 2'O-methyl adenosine
acagcttatttggaagctgaaatgtgaggtttataacactcacaagaatcctgaaaaaggatgccaaacggaatcccagccaggcagca

SEQ ID NO: 2489 - RNA, 89 nt, synthetic construct
  source 1..89: mol_type = other RNA
  modified_base 1: mod_base = OTHER; note = 2'O-methyl adenosine phosphorothioate
  modified_base 2: mod_base = OTHER; note = 2'O-methyl cytidine phosphorothioate
  modified_base 3: mod_base = OTHER; note = 2'O-methyl adenosine phosphorothioate
  modified_base 87: mod_base = OTHER; note = 2'O-methyl cytidine phosphorothioate
  modified_base 88: mod_base = OTHER; note = 2'O-methyl adenosine phosphorothioate
  modified_base 89: mod_base = OTHER; note = 2'O-methyl guanosine
acagcttatttggaagctgaaatgtgaggtttataacactcacaagaatcctgaaaaaggatgccaaactaggaatcccagccaggcag

SEQ ID NO: 2490 - RNA, 89 nt, synthetic construct
  source 1..89: mol_type = other RNA
  modified_base 1: mod_base = OTHER; note = 2'O-methyl adenosine phosphorothioate
  modified_base 2: mod_base = OTHER; note = 2'O-methyl cytidine phosphorothioate
  modified_base 3: mod_base = OTHER; note = 2'O-methyl adenosine phosphorothioate
  modified_base 87: mod_base = OTHER; note = 2'O-methyl cytidine phosphorothioate
  modified_base 88: mod_base = OTHER; note = 2'O-methyl cytidine phosphorothioate
  modified_base 89: mod_base = OTHER; note = 2'O-methyl uridine
acagcttatttggaagctgaaatgtgaggtttataacactcacaagaatcctgaaaaaggatgccaaacgcagcccctcctcgtgccct

SEQ ID NO: 2491 - RNA, 89 nt, synthetic construct
  source 1..89: mol_type = other RNA
  modified_base 1: mod_base = OTHER; note = 2'O-methyl adenosine phosphorothioate
  modified_base 2: mod_base = OTHER; note = 2'O-methyl cytidine phosphorothioate
  modified_base 3: mod_base = OTHER; note = 2'O-methyl adenosine phosphorothioate
  modified_base 87: mod_base = OTHER; note = 2'O-methyl guanosine phosphorothioate
  modified_base 88: mod_base = OTHER; note = 2'O-methyl guanosine phosphorothioate
  modified_base 89: mod_base = OTHER; note = 2'O-methyl guanosine
acagcttatttggaagctgaaatgtgaggtttataacactcacaagaatcctgaaaaaggatgccaaacacaggtaggacccagcaggg

SEQ ID NO: 2492 - RNA, 89 nt, synthetic construct
  source 1..89: mol_type = other RNA
  modified_base 1: mod_base = OTHER; note = 2'O-methyl adenosine phosphorothioate
  modified_base 2: mod_base = OTHER; note = 2'O-methyl cytidine phosphorothioate
  modified_base 3: mod_base = OTHER; note = 2'O-methyl adenosine phosphorothioate
  modified_base 87: mod_base = OTHER; note = 2'O-methyl cytidine phosphorothioate
  modified_base 88: mod_base = OTHER; note = 2'O-methyl uridine phosphorothioate
  modified_base 89: mod_base = OTHER; note = 2'O-methyl guanosine
acagcttatttggaagctgaaatgtgaggtttataacactcacaagaatcctgaaaaaggatgccaaactgaccagatggacctggctg

SEQ ID NO: 2493 - RNA, 89 nt, synthetic construct
  source 1..89: mol_type = other RNA
  modified_base 1: mod_base = OTHER; note = 2'O-methyl adenosine phosphorothioate
  modified_base 2: mod_base = OTHER; note = 2'O-methyl cytidine phosphorothioate
  modified_base 3: mod_base = OTHER; note = 2'O-methyl adenosine phosphorothioate
  modified_base 87: mod_base = OTHER; note = 2'O-methyl uridine phosphorothioate
  modified_base 88: mod_base = OTHER; note = 2'O-methyl guanosine phosphorothioate
  modified_base 89: mod_base = OTHER; note = 2'O-methyl guanosine
acagcttatttggaagctgaaatgtgaggtttataacactcacaagaatcctgaaaaaggatgccaaacccacttctatgaccagatgg

SEQ ID NO: 2494 - RNA, 89 nt, synthetic construct
  source 1..89: mol_type = other RNA
  modified_base 1: mod_base = OTHER; note = 2'O-methyl adenosine phosphorothioate
  modified_base 2: mod_base = OTHER; note = 2'O-methyl cytidine phosphorothioate
  modified_base 3: mod_base = OTHER; note = 2'O-methyl adenosine phosphorothioate
  modified_base 87: mod_base = OTHER; note = 2'O-methyl guanosine phosphorothioate
  modified_base 88: mod_base = OTHER; note = 2'O-methyl guanosine phosphorothioate
  modified_base 89: mod_base = OTHER; note = 2'O-methyl adenosine
acagcttatttggaagctgaaatgtgaggtttataacactcacaagaatcctgaaaaaggatgccaaacaccagatggacctggctgga

SEQ ID NO: 2495 - RNA, 89 nt, synthetic construct
  source 1..89: mol_type = other RNA
  modified_base 1: mod_base = OTHER; note = 2'O-methyl adenosine phosphorothioate
  modified_base 2: mod_base = OTHER; note = 2'O-methyl cytidine phosphorothioate
  modified_base 3: mod_base = OTHER; note = 2'O-methyl adenosine phosphorothioate
  modified_base 87: mod_base = OTHER; note = 2'O-methyl cytidine phosphorothioate
  modified_base 88: mod_base = OTHER; note = 2'O-methyl cytidine phosphorothioate
  modified_base 89: mod_base = OTHER; note = 2'O-methyl cytidine
acagcttatttggaagctgaaatgtgaggtttataacactcacaagaatcctgaaaaaggatgccaaacccaccatggagttggggccc

SEQ ID NO: 2496 - RNA, 89 nt, synthetic construct
  source 1..89: mol_type = other RNA
  modified_base 1: mod_base = OTHER; note = 2'O-methyl adenosine phosphorothioate
  modified_base 2: mod_base = OTHER; note = 2'O-methyl cytidine phosphorothioate
  modified_base 3: mod_base = OTHER; note = 2'O-methyl adenosine phosphorothioate
  modified_base 87: mod_base = OTHER; note = 2'O-methyl adenosine phosphorothioate
  modified_base 88: mod_base = OTHER; note = 2'O-methyl cytidine phosphorothioate
  modified_base 89: mod_base = OTHER; note = 2'O-methyl cytidine
acagcttatttggaagctgaaatgtgaggtttataacactcacaagaatcctgaaaaaggatgccaaaccctctaccacttctatgacc

SEQ ID NO: 2497 - RNA, 89 nt, synthetic construct
  source 1..89: mol_type = other RNA
  modified_base 1: mod_base = OTHER; note = 2'O-methyl adenosine phosphorothioate
  modified_base 2: mod_base = OTHER; note = 2'O-methyl cytidine phosphorothioate
  modified_base 3: mod_base = OTHER; note = 2'O-methyl adenosine phosphorothioate
  modified_base 87: mod_base = OTHER; note = 2'O-methyl guanosine phosphorothioate
  modified_base 88: mod_base = OTHER; note = 2'O-methyl uridine phosphorothioate
  modified_base 89: mod_base = OTHER; note = 2'O-methyl guanosine
acagcttatttggaagctgaaatgtgaggtttataacactcacaagaatcctgaaaaaggatgccaaacggggccccaactccatggtg

SEQ ID NO: 2498 - RNA, 89 nt, synthetic construct
  source 1..89: mol_type = other RNA
  modified_base 1: mod_base = OTHER; note = 2'O-methyl adenosine phosphorothioate
  modified_base 2: mod_base = OTHER; note = 2'O-methyl cytidine phosphorothioate
  modified_base 3: mod_base = OTHER; note = 2'O-methyl adenosine phosphorothioate
  modified_base 87: mod_base = OTHER; note = 2'O-methyl guanosine phosphorothioate
  modified_base 88: mod_base = OTHER; note = 2'O-methyl guanosine phosphorothioate
  modified_base 89: mod_base = OTHER; note = 2'O-methyl cytidine
acagcttatttggaagctgaaatgtgaggtttataacactcacaagaatcctgaaaaaggatgccaaacgtcatagaagtggtagaggc

SEQ ID NO: 2499 - RNA, 89 nt, synthetic construct
  source 1..89: mol_type = other RNA
  modified_base 1: mod_base = OTHER; note = 2'O-methyl adenosine phosphorothioate
  modified_base 2: mod_base = OTHER; note = 2'O-methyl cytidine phosphorothioate
  modified_base 3: mod_base = OTHER; note = 2'O-methyl adenosine phosphorothioate
  modified_base 87: mod_base = OTHER; note = 2'O-methyl guanosine phosphorothioate
  modified_base 88: mod_base = OTHER; note = 2'O-methyl adenosine phosphorothioate
  modified_base 89: mod_base = OTHER; note = 2'O-methyl guanosine
acagcttatttggaagctgaaatgtgaggtttataacactcacaagaatcctgaaaaaggatgccaaacacatggaaggtgatgaagag

SEQ ID NO: 2500 - RNA, 89 nt, synthetic construct
  source 1..89: mol_type = other RNA
  modified_base 1: mod_base = OTHER; note = 2'O-methyl adenosine phosphorothioate
  modified_base 2: mod_base = OTHER; note = 2'O-methyl cytidine phosphorothioate
  modified_base 3: mod_base = OTHER; note = 2'O-methyl adenosine phosphorothioate
  modified_base 87: mod_base = OTHER; note = 2'O-methyl adenosine phosphorothioate
  modified_base 88: mod_base = OTHER; note = 2'O-methyl adenosine phosphorothioate
  modified_base 89: mod_base = OTHER; note = 2'O-methyl guanosine
acagcttatttggaagctgaaatgtgaggtttataacactcacaagaatcctgaaaaaggatgccaaactgacatggaaggtgatgaag

SEQ ID NO: 2501 - RNA, 89 nt, synthetic construct
  source 1..89: mol_type = other RNA
  modified_base 1: mod_base = OTHER; note = 2'O-methyl adenosine phosphorothioate
  modified_base 2: mod_base = OTHER; note = 2'O-methyl cytidine phosphorothioate
  modified_base 3: mod_base = OTHER; note = 2'O-methyl adenosine phosphorothioate
  modified_base 87: mod_base = OTHER; note = 2'O-methyl cytidine phosphorothioate
  modified_base 88: mod_base = OTHER; note = 2'O-methyl uridine phosphorothioate
  modified_base 89: mod_base = OTHER; note = 2'O-methyl guanosine
acagcttatttggaagctgaaatgtgaggtttataacactcacaagaatcctgaaaaaggatgccaaactcttccaggactcccagctg

SEQ ID NO: 2502 - RNA, 98 nt, synthetic construct
  source 1..98: mol_type = other RNA
tggggcagttggttgcccttagcctgaggcatttattgcactcgggaagtaccatttctcagaaatggtacatccaacgtgaggaagcacctgagccc

SEQ ID NO: 2503 - RNA, 98 nt, synthetic construct
  source 1..98: mol_type = other RNA
tggggcagttggttgcccttagcctgaggcatttattgcactcgggaagtaccatttctcagaaatggtacatccaaccagatgcagttattgtacaa

SEQ ID NO: 2504 - RNA, 98 nt, synthetic construct
  source 1..98: mol_type = other RNA
tggggcagttggttgcccttagcctgaggcatttattgcactcgggaagtaccatttctcagaaatggtacatccaaccagctctcagccaccttccc

SEQ ID NO: 2505 - RNA, 98 nt, synthetic construct
  source 1..98: mol_type = other RNA
tggggcagttggttgcccttagcctgaggcatttattgcactcgggaagtaccatttctcagaaatggtacatccaacaccagcttgacatcacagga

SEQ ID NO: 2506 - RNA, 98 nt, synthetic construct
  source 1..98: mol_type = other RNA
tggggcagttggttgcccttagcctgaggcatttattgcactcgggaagtaccatttctcagaaatggtacatccaacgaacccaatcactgacaggt

SEQ ID NO: 2507 - RNA, 98 nt, synthetic construct
  source 1..98: mol_type = other RNA
tggggcagttggttgcccttagcctgaggcatttattgcactcgggaagtaccatttctcagaaatggtacatccaactatctgtaaaaccaagaggc

SEQ ID NO: 2508 - RNA, 98 nt, synthetic construct
  source 1..98: mol_type = other RNA
tggggcagttggttgcccttagcctgaggcatttattgcactcgggaagtaccatttctcagaaatggtacatccaaccgctactctctctttctggc

SEQ ID NO: 2509 - RNA, 98 nt, synthetic construct
  source 1..98: mol_type = other RNA
tggggcagttggttgcccttagcctgaggcatttattgcactcgggaagtaccatttctcagaaatggtacatccaacgatggatgaaacccagacac

SEQ ID NO: 2510 - RNA, 98 nt, synthetic construct
  source 1..98: mol_type = other RNA
tggggcagttggttgcccttagcctgaggcatttattgcactcgggaagtaccatttctcagaaatggtacatccaacatctatgaaaaagacagtgg

SEQ ID NO: 2511 - RNA, 98 nt, synthetic construct
  source 1..98: mol_type = other RNA
tggggcagttggttgcccttagcctgaggcatttattgcactcgggaagtaccatttctcagaaatggtacatccaacctccgtggccttagctgtgc

SEQ ID NO: 2512 - DNA, 182 bp, synthetic construct
  source 1..182: mol_type = other DNA
acacagacaccatcaactgcgaccagttcagcaggctgttgtgtgacatggaaggtgatgaagagaccagggaggcttatgccaatatcggtgaggaagcacctgagcccagaaaaggacaatcaagggcaagagttctttgctgccacttgtcaatatcacccattcatcatgagccacgt

SEQ ID NO: 2513 - DNA, 231 bp, synthetic construct
  source 1..231: mol_type = other DNA
tctagggatggtggcttctggaaggctgaccatgcacaggcctccaatccctccccctggcctctgtttccgacagcttgtacaataactgcatctgcgacgtgggagccgagagcttggctcgtgtgcttccggacatggtgtccctccgggtgatggagtgagtgtgggagtctgggcggtgggtggctcagcccggggtgggagacactgaagtctctccctggtgtc

SEQ ID NO: 2514 - DNA, 260 bp, synthetic construct
  source 1..260: mol_type = other DNA
ggatgggaagggtcagatggccccaggacgctagctgatggcccccatctgattccacctgcagcctggatgcgctgagtgagaacaagatcggggacgagggtgtctcgcagctctcagccaccttcccccagctgaagtccttggaaaccctcaagtgagtgagctgggcctgcccttcctgctgaatcgggcccccaaagtccggctgactttttcaaaattaatttaaatttgtttttttagacaagggctcgctg

SEQ ID NO: 2515 - DNA, 255 bp, synthetic construct
  source 1..255: mol_type = other DNA
gcccaagaactaggaggtctggggtgggagagtcagcctgctctggatgctgaaagaatgtctgtttttccttttagaaagttcctgtgatgtcaagctggtcgagaaaagctttgaaacaggtaagacaggggtctagcctgggtttgcacaggattgcggaagtgatgaacccgcaataaccctgcctggatgagggagtgggaagaaattagtagatgtgggaatgaatgatgaggaatggaaacagcggtt

SEQ ID NO: 2516 - DNA, 251 bp, synthetic construct
  source 1..251: mol_type = other DNA
aggggatatgcacagaagctgcaagggacaggaggtgcaggagctgcaggcctcccccacccagcctgctctgccttggggaaaaccgtgggtgtgtcctgcaggccatgcaggcctgggacatgcaagcccataaccgctgtggcctcttggttttacagatacgaacctaaactttcaaaacctgtcagtgattgggttccgaatcctcctcctgaaagtggccgggtttaatctgctcatgacgctgc

SEQ ID NO: 2517 - DNA, 251 bp, synthetic construct; identical to SEQ ID NO: 2516
  source 1..251: mol_type = other DNA

SEQ ID NO: 2518 - DNA, 225 bp, synthetic construct
  source 1..225: mol_type = other DNA
aatataagtggaggcgtcgcgctggcgggcattcctgaagctgacagcattcgggccgagatgtctcgctccgtggccttagctgtgctcgcgctactctctctttctggcctggaggctatccagcgtgagtctctcctaccctcccgctctggtccttcctctcccgctctgcaccctctgtggccctcgctgtgctctctcgctccgtgacttcccttctcc

SEQ ID NO: 2519 - DNA, 266 bp, synthetic construct
  source 1..266: mol_type = other DNA
cccaagtgaaataccctggcaatattaatgtgtcttttcccgatattcctcaggtactccaaagattcaggtttactcacgtcatccagcagagaatggaaagtcaaatttcctgaattgctatgtgtctgggtttcatccatccgacattgaagttgacttactgaagaatggagagagaattgaaaaagtggagcattcagacttgtctttcagcaaggactggtctttctatctcttgtactacactgaattcacccccactg

SEQ ID NO: 2520 - DNA, 236 bp, synthetic construct
  source 1..236: mol_type = other DNA
agcctattctgccagccttatttctaaccattttagacatttgttagtacatggtattttaaaagtaaaacttaatgtcttccttttttttctccactgtctttttcatagatcgagacatgtaagcagcatcatggaggtaagtttttgaccttgagaaaatgtttttgtttcactgtcctgaggactatttatagacagctctaacatgataaccctcactatgtggagaacat

SEQ ID NO: 2521 - DNA, 233 bp, synthetic construct
  source 1..233: mol_type = other DNA
cctctctctaacctggcactgcgtcgctggcttggagacaggtgacggtccctgcgggccttgtcctgattggctgggcacgcgtttaatataagtggaggcgtcgcgctggcgggcattcctgaagctgacagcattcgggccgagatgtctcgctccgtggccttagctgtgctcgcgctactctctctttctggcctggaggctatccagcgtgagtctctcctaccctc

SEQ ID NO: 2522 - RNA, 69 nt, synthetic construct
  source 1..69: mol_type = other RNA
acagcttatttggaagctgaaatgtgaggtttataacactcacaagaatcctgaaaaaggatgccaaac

SEQ ID NO: 2523 - RNA, 69 nt, synthetic construct; identical to SEQ ID NO: 2522
  source 1..69: mol_type = other RNA
  modified_base 1: mod_base = OTHER; note = 2'O-methyl adenosine phosphorothioate
  modified_base 2: mod_base = OTHER; note = 2'O-methyl cytidine phosphorothioate
  modified_base 3: mod_base = OTHER; note = 2'O-methyl adenosine phosphorothioate

SEQ ID NO: 2524 - DNA, 40 bp, synthetic construct
  source 1..40: mol_type = other DNA
ttcgggccgagatgtctcgctccgtggccttagctgtgct

SEQ ID NO: 2525 - DNA, 36 bp, synthetic construct
  source 1..36: mol_type = other DNA
ttcgggccgagatgtctccgtggccttagctgtgct

SEQ ID NO: 2526 - DNA, 35 bp, synthetic construct
  source 1..35: mol_type = other DNA
ttcgggccgagatgtctcgtggccttagctgtgct

SEQ ID NO: 2527 - DNA, 40 bp, synthetic construct
  source 1..40: mol_type = other DNA
agaaccctgaccctgccgtgtaccagctgagagactctaa

SEQ ID NO: 2528 - DNA, 38 bp, synthetic construct
  source 1..38: mol_type = other DNA
agaaccctgaccctgccgtaccagctgagagactctaa

SEQ ID NO: 2529 - DNA, 40 bp, synthetic construct
  source 1..40: mol_type = other DNA
agaaccctgaccctgccttgtaccagctgagagactctaa

SEQ ID NO: 2530 - DNA, 33 bp, synthetic construct
  source 1..33: mol_type = other DNA
agaaccctgaccctgccagctgagagactctaa

SEQ ID NO: 2531 - DNA, 26 bp, synthetic construct
  source 1..26: mol_type = other DNA
agaaccctgaccctgagagactctaa

SEQ ID NO: 2532 - DNA, 33 bp, synthetic construct
  source 1..33: mol_type = other DNA
agaaccctgaccctaccagctgagagactctaa

SEQ ID NO: 2533 - DNA, 39 bp, synthetic construct
  source 1..39: mol_type = other DNA
agaaccctgaccctgccgtgtccagctgagagactctaa

SEQ ID NO: 2534 - DNA, 40 bp, synthetic construct
  source 1..40: mol_type = other DNA
agaaccctgaccctgccgtgtccgtgtaccagctgagaga

SEQ ID NO: 2535 - DNA, 35 bp, synthetic construct
  source 1..35: mol_type = other DNA
agaaccctgaccctgtaccagctgagagactctaa

SEQ ID NO: 2536 - DNA, 20 bp, synthetic construct
  source 1..20: mol_type = other DNA
agaaccctgaccctgccgtg

SEQ ID NO: 2537 - DNA, 40 bp, synthetic construct
  source 1..40: mol_type = other DNA
accctgaccctgccgccgtgtaccagctgagagactctaa

SEQ ID NO: 2538 - DNA, 38 bp, synthetic construct
  source 1..38: mol_type = other DNA
agaaccctgaccctggtgtaccagctgagagactctaa

SEQ ID NO: 2539 - DNA, 40 bp, synthetic construct
  source 1..40: mol_type = other DNA
agaaccctgaccctgccgtgtaacagctgagagactctaa

SEQ ID NO: 2540 - DNA, 34 bp, synthetic construct
  source 1..34: mol_type = other DNA
agaaccctgaccctgccgtgctgagagactctaa

SEQ ID NO: 2541 - DNA, 40 bp, synthetic construct
  source 1..40: mol_type = other DNA
agaaccctgaccctgccgtgtaccgtgtaccagctgagag

SEQ ID NO: 2542 - DNA, 35 bp, synthetic construct
  source 1..35: mol_type = other DNA
agaaccctgaccctgccgtgtctgagagactctaa

SEQ ID NO: 2543 - DNA, 40 bp, synthetic construct
  source 1..40: mol_type = other DNA
cagacaaaactgtgctagacatgaggtctatggacttcaa

SEQ ID NO: 2544 - DNA, 39 bp, synthetic construct
  source 1..39: mol_type = other DNA
cagacaaaactgtgctagacatgaggtctatggacttaa

SEQ ID NO: 2545 - DNA, 35 bp, synthetic construct
  source 1..35: mol_type = other DNA
cagacaaaactgtgcttgaggtctatggacttcaa

SEQ ID NO: 2546 - DNA, 35 bp, synthetic construct
  source 1..35: mol_type = other DNA
cagacaaaactgtgctagaggtctatggacttcaa

SEQ ID NO: 2547 - DNA, 39 bp, synthetic construct
  source 1..39: mol_type = other DNA
cagacaaaactgtgctagacatgaggtctatggacttca

SEQ ID NO: 2548 - DNA, 38 bp, synthetic construct
  source 1..38: mol_type = other DNA
cagacaaaactgtgctacatgaggtctatggacttcaa

SEQ ID NO: 2549 - DNA, 33 bp, synthetic construct
  source 1..33: mol_type = other DNA
cagacaaaactgtgctaggtctatggacttcaa

SEQ ID NO: 2550 - DNA, 40 bp, synthetic construct
  source 1..40: mol_type = other DNA
cagacaaaactgtgctagacatgaggtctatggtcttcaa

SEQ ID NO: 2551 - DNA, 36 bp, synthetic construct
  source 1..36: mol_type = other DNA
cagacaaaactgtgctatgaggtctatggacttcaa

SEQ ID NO: 2552 - DNA, 37 bp, synthetic construct
  source 1..37: mol_type = other DNA
cagacaaaactgtgctagacatgtctatggacttcaa

SEQ ID NO: 2553 - DNA, 35 bp, synthetic construct
  source 1..35: mol_type = other DNA
cagacaaaactgtgctagacgtctatggacttcaa

SEQ ID NO: 2554 - DNA, 40 bp, synthetic construct
  source 1..40: mol_type = other DNA
cagacaaaactgtgctagactagacatgaggtctatggac

SEQ ID NO: 2555 - DNA, 39 bp, synthetic construct
  source 1..39: mol_type = other DNA
cagacaaaactgtgctagacatgaggtctatggactcaa

SEQ ID NO: 2556 - DNA, 40 bp, synthetic construct
  source 1..40: mol_type = other DNA
agacaaaactgtgcgtagacatgaggtctatggacttcaa

SEQ ID NO: 2557 - DNA, 40 bp, synthetic construct
  source 1..40: mol_type = other DNA
cagacaaaactgtgctagacatgaggtctatggactttca

SEQ ID NO: 2558 - DNA, 19 bp, synthetic construct
  source 1..19: mol_type = other DNA
ttcgggccttagctgtgct

SEQ ID NO: 2559 - DNA, 18 bp, synthetic construct
  source 1..18: mol_type = other DNA
ttcgggccgagatgtgct

SEQ ID NO: 2560 - DNA, 34 bp, synthetic construct
  source 1..34: mol_type = other DNA
ttcgggccgagatgtccgtggccttagctgtgct

SEQ ID NO: 2561 - DNA, 40 bp, synthetic construct
  source 1..40: mol_type = other DNA
tcgggccgagatgtctcgctccgtggccttagctgtgctc

SEQ ID NO: 2562 - DNA, 40 bp, synthetic construct
  source 1..40: mol_type = other DNA
tcgggccgagatgtctcgcttccgtggccttagctgtgct

SEQ ID NO: 2563 - DNA, 19 bp, synthetic construct
  source 1..19: mol_type = other DNA
tcgggccttagctgtgctc

SEQ ID NO: 2564 - DNA, 35 bp, synthetic construct
  source 1..35: mol_type = other DNA
tcgggccgagatgtctcgtggccttagctgtgctc

SEQ ID NO: 2565 - DNA, 39 bp, synthetic construct
  source 1..39: mol_type = other DNA
tcgggccgagatgtctcgcccgtggccttagctgtgctc

SEQ ID NO: 2566 - DNA, 74 bp, synthetic construct
  source 1..74: mol_type = other DNA
ctttatatatcttgtggaaaggacgaaacaccggctttcaagactaatagattgctccttacgaggagacgggt

SEQ ID NO: 2567 - DNA, 63 bp, synthetic construct
  source 1..63: mol_type = other DNA
ctttatatatcttgtggaaaggacgaaacaccggaatagattgctccttacgaggagacgggt

SEQ ID NO: 2568 - DNA, 64 bp, synthetic construct
  source 1..64: mol_type = other DNA
tatcttgtggaaaggacgaaacaccggctttcaagactaatagattgctccttacgaggagacg

SEQ ID NO: 2569 - DNA, 48 bp, synthetic construct
  source 1..48: mol_type = other DNA
tatcttgtggaaaggacgaaacaccggattgctccttacgaggagacg

SEQ ID NO: 2570 - DNA, 65 bp, synthetic construct
  source 1..65: mol_type = other DNA
atatcttgtggaaaggacgaaacaccggctttcaagactaatagattgctccttacgaggagacg

SEQ ID NO: 2571 - DNA, 48 bp, synthetic construct
  source 1..48: mol_type = other DNA
atatcttgtggaaaggacgaaacaccggttgctccttacgaggagacg

SEQ ID NO: 2572 - RNA, 56 nt, synthetic construct
  source 1..56: mol_type = other RNA
ctttcaagactaatagattgctccttacgaggagacaggtcccgaacagcagggag

SEQ ID NO: 2573 - RNA, 56 nt, synthetic construct
  source 1..56: mol_type = other RNA
ctttcaagactaatagattgctccttacgaggagactttaggtcccgaacagcagg

SEQ ID NO: 2574 - RNA, 56 nt, synthetic construct
  source 1..56: mol_type = other RNA
ctttcaagactaatagattgctccttacgaggagacctttaggtcccgaacagcag

SEQ ID NO: 2575 - RNA, 56 nt, synthetic construct
  source 1..56: mol_type = other RNA
ctttcaagactaatagattgctccttacgaggagacgggacctaaagaaactggag

SEQ ID NO: 2576 - RNA, 56 nt, synthetic construct
  source 1..56: mol_type = other RNA
ctttcaagactaatagattgctccttacgaggagacgggaaagcctgggggcctga

SEQ ID NO: 2577 - RNA, 56 nt, synthetic construct
  source 1..56: mol_type = other RNA
ctttcaagactaatagattgctccttacgaggagacggggaaagcctgggggcctg

SEQ ID NO: 2578 - RNA, 56 nt, synthetic construct
  source 1..56: mol_type = other RNA
ctttcaagactaatagattgctccttacgaggagacccccaaactggtgcggatcc

SEQ ID NO: 2579 - RNA, 56 nt, synthetic construct
  source 1..56: mol_type = other RNA
ctttcaagactaatagattgctccttacgaggagaccccaaactggtgcggatcct

SEQ ID NO: 2580 - RNA, 56 nt, synthetic construct
  source 1..56: mol_type = other RNA
ctttcaagactaatagattgctccttacgaggagacttctcactcagcgcatccag

SEQ ID NO: 2581 - RNA, 56 nt, synthetic construct
  source 1..56: mol_type = other RNA
ctttcaagactaatagattgctccttacgaggagacagctgggggaaggtggctga

SEQ ID NO: 2582 - RNA, 56 nt, synthetic construct
  source 1..56: mol_type = other RNA
ctttcaagactaatagattgctccttacgaggagacccccagctgaagtccttgga

SEQ ID NO: 2583 - RNA, 56 nt, synthetic construct
  source 1..56: mol_type = other RNA
ctttcaagactaatagattgctccttacgaggagaccaaggacttcagctggggga

SEQ ID NO: 2584 - RNA, 56 nt, synthetic construct
  source 1..56: mol_type = other RNA
ctttcaagactaatagattgctccttacgaggagacccaaggacttcagctggggg

SEQ ID NO: 2585 - RNA, 56 nt, synthetic construct
  source 1..56: mol_type = other RNA
ctttcaagactaatagattgctccttacgaggagacagggtttccaaggacttcag

SEQ ID NO: 2586 - RNA, 56 nt, synthetic construct
  source 1..56: mol_type = other RNA
ctttcaagactaatagattgctccttacgaggagactaggcacccaggtcagtgat

SEQ ID NO: 2587 - RNA, 56 nt, synthetic construct
  source 1..56: mol_type = other RNA
ctttcaagactaatagattgctccttacgaggagacgtaggcacccaggtcagtga

SEQ ID NO: 2588 - RNA, 56 nt, synthetic construct
  source 1..56: mol_type = other RNA
ctttcaagactaatagattgctccttacgaggagacgctcgctgcatccctgctca

SEQ ID NO: 2589 - RNA, 56 nt, synthetic construct
  source 1..56: mol_type = other RNA
ctttcaagactaatagattgctccttacgaggagacgcctgagcagggatgcagcg

SEQ ID NO: 2590 - RNA, 56 nt, synthetic construct
  source 1..56: mol_type = other RNA
ctttcaagactaatagattgctccttacgaggagactacaataactgcatctgcga

SEQ ID NO: 2591 - RNA, 56 nt, synthetic construct
  source 1..56: mol_type = other RNA
ctttcaagactaatagattgctccttacgaggagacgctcgtgtgcttccggacat

SEQ ID NO: 2592 - protein, 717 aa, synthetic construct
MIKPTVSQFLTPGFKLIRNHSRTAGRKLKNEGEEACKKFVRENEIPKDECPNFQGGPAIANIIAKSREFTEWEIYQSSLAIQEVIFTLPKDKLPEPILKEEWRAQWLSEHGLDTVPYKEAAGLNLIIKNAVNTYKGVQVKVDNKNKNNLAKINRKNEIAKLNGEQEISFEEIKAFDDKGYLLQKPSPNKSIYCYQSVSPKPFITSKYHNVNLPEEYIGYYRKSNEPIVSPYQFDRLRIPIGEPGYVPKWQYTFLSKKENKRRKLSKRIKNVSPILGIICIKKDWCVFDMRGLLRTNHWKKYHKPTDSINDLFDYFTGDPVIDTKANVVRFRYKMENGIVNYKPVREKKGKELLENICDQNGSCKLATVDVGQNNPVAIGLFELKKVNGELTKTLISRHPTPIDFCNKITAYRERYDKLESSIKLDAIKQLTSEQKIEVDNYNNNFTPQNTKQIVCSKLNINPNDLPWDKMISGTHFISEKAQVSNKSEIYFTSTDKGKTKDVMKSDYKWFQDYKPKLSKEVRDALSDIEWRLRRESLEFNKLSKSREQDARQLANWISSMCDVIGIENLVKKNNFFGGSGKREPGWDNFYKPKKENRWWINAIHKALTELSQNKGKRVILLPAMRTSITCPKCKYCDSKNRNGEKFNCLKCGIELNADIDVATENLATVAITAQSMPKPTCERSGDAKKPVRARKAKAPEFHDKLAPSYTVVLREAV

SEQ ID NO: 2593 - RNA, 54 nt, synthetic construct
  source 1..54: mol_type = other RNA
  modified_base 1: mod_base = OTHER; note = 2'O-methyl cytidine phosphorothioate
  modified_base 2: mod_base = OTHER; note = 2'O-methyl uridine phosphorothioate
  modified_base 3: mod_base = OTHER; note = 2'O-methyl uridine phosphorothioate
  modified_base 52: mod_base = OTHER; note = 2'O-methyl uridine phosphorothioate
  modified_base 53: mod_base = OTHER; note = 2'O-methyl adenosine phosphorothioate
  modified_base 54: mod_base = OTHER; note = 2'O-methyl cytidine
ctttcaagactaatagattgctccttacgaggagacgagtctctcagctggtac

SEQ ID NO: 2594 - RNA, 56 nt, synthetic construct
  source 1..56: mol_type = other RNA
gtttgagaaccttatgaaattacaaggatgccaaactattaaatactcgtattgct

SEQ ID NO: 2595 - RNA, 56 nt, synthetic construct; identical to SEQ ID NO: 2594
  source 1..56: mol_type = other RNA

SEQ ID NO: 2596 - RNA, 89 nt, synthetic construct
  source 1..89: mol_type = other RNA
acagcttatttggaagctgaaatgtgaggtttataacactcacaagaatcctgaaaaaggatgccaaactattaaatactcgtattgct

SEQ ID NO: 2597 - RNA, 52 nt, synthetic construct
  source 1..52: mol_type = other RNA
acagcttatttggaagctgaaatgtgaggtttataacactcacaagaatcct

SEQ ID NO: 2598 - RNA, 69 nt, synthetic construct
  source 1..69: mol_type = other RNA
tatatttgataaaaatatacagcttatttggaagctgaaatgtgaggtttataacactcacaagaatcc

SEQ ID NO: 2599 - protein, 429 aa, synthetic construct
MVITRKIALTVVGNKEEKDRVYTYIRDGIKNQNLAMNQYMSALYVANMQDISKDDRKELNHLYTRISTSKKGSAYSTDIQFPKGLPCTSSLGQEVRAKFKKACKDGLMYGRVSLPTYRANNPLLIHVDYVRLRSTNPHNDTGLYHNYESHTEFLEHLYKNDCEVFIKFANNITFQLFFGQPHKSHELRSVIQKVFEEYYSVCGSSIEISKKGKIMLNMCIEIPVEKKELDENIVVGVDLGISTPAMCGLNCNDYVREGIGSKDTLLSKRTQLQRQYRELQGRMKMTNGGHGRGKKLKKMDDYRNHERHFVQTYNHQVSKKIVDFALKYKAKYINVEDLSGFGNRDTNQWVLRNWSYYELQQYITYKAQKYGIEVRKVKPYLTSQTCSHCGHYEPGQRLDQAHFECKNCGLKINADFNASRNIAMSTEFV

SEQ ID NO: 2600 - RNA, 89 nt, synthetic construct
  source 1..89: mol_type = other RNA
acagcttatttggaagctgaaatgtgaggtttataacactcacaagaatcctgaaaaaggatgccaaactcttcgcccagagcatccca

SEQ ID NO: 2601 - protein, 448 aa, synthetic construct; identical to SEQ ID NO: 2435

SEQ ID NO: 2602 - RNA, 20 nt, synthetic construct
  source 1..20: mol_type = other RNA
agtctccaggaagaaattaa

SEQ ID NO: 2603 - DNA, 87 bp, synthetic construct
  source 1..87: mol_type = other DNA
aaaatcggtgaataggcagacagacttgtcactggatttagcggccgcgagtctctcagctggtacacggcagggtcagggttctgg

SEQ ID NO: 2604 - DNA, 88 bp, synthetic construct
  source 1..88: mol_type = other DNA
cagacagacttgtcactggatttagagtctctcagctggtgcggccgcacacggcagggtcagggttctggatatctgtgggacaaga

SEQ ID NO: 2605 - DNA, 88 bp, synthetic construct
  source 1..88: mol_type = other DNA
cacagatatccagaaccctgaccctgccgtgtaccagctggcggccgcagagactctaaatccagtgacaagtctgtctgcctattca

SEQ ID NO: 2606 - DNA, 88 bp, synthetic construct
  source 1..88: mol_type = other DNA
aatcggtgaataggcagacagacttgtcactggatttagagcggccgcgtctctcagctggtacacggcagggtcagggttctggata

SEQ ID NO: 2607 - DNA, 88 bp, synthetic construct
  source 1..88: mol_type = other DNA
gacagacttgtcactggatttagagtctctcagctggtacgcggccgcacggcagggtcagggttctggatatctgtgggacaagagg

SEQ ID NO: 2608 - DNA, 88 bp, synthetic construct
  source 1..88: mol_type = other DNA
cccacagatatccagaaccctgaccctgccgtgtaccagcgcggccgctgagagactctaaatccagtgacaagtctgtctgcctatt

SEQ ID NO: 2609 - DNA, 88 bp, synthetic construct
  source 1..88: mol_type = other DNA
tcggtgaataggcagacagacttgtcactggatttagagtgcggccgcctctcagctggtacacggcagggtcagggttctggatatc

SEQ ID NO: 2610 - DNA, 88 bp, synthetic construct
  source 1..88: mol_type = other DNA
cagacttgtcactggatttagagtctctcagctggtacacgcggccgcggcagggtcagggttctggatatctgtgggacaagaggat

SEQ ID NO: 2611 - DNA, 88 bp, synthetic construct
  source 1..88: mol_type = other DNA
gtcccacagatatccagaaccctgaccctgccgtgtaccagcggccgcgctgagagactctaaatccagtgacaagtctgtctgccta

SEQ ID NO: 2612 - DNA, 88 bp, synthetic construct
  source 1..88: mol_type = other DNA
ggtgaataggcagacagacttgtcactggatttagagtctgcggccgcctcagctggtacacggcagggtcagggttctggatatctg

SEQ ID NO: 2613 - DNA, 88 bp, synthetic construct
  source 1..88: mol_type = other DNA
tgtcactggatttagagtctctcagctggtacacggcagggcggccgcgtcagggttctggatatctgtgggacaagaggatcagggt

SEQ ID NO: 2614 - DNA, 88 bp, synthetic construct
  source 1..88: mol_type = other DNA
ttgtcccacagatatccagaaccctgaccctgccgtgtacgcggccgccagctgagagactctaaatccagtgacaagtctgtctgcc

SEQ ID NO: 2615 - DNA, 88 bp, synthetic construct
  source 1..88: mol_type = other DNA
tgaataggcagacagacttgtcactggatttagagtctctgcggccgccagctggtacacggcagggtcagggttctggatatctgtg

SEQ ID NO: 2616 - DNA, 88 bp, synthetic construct
  source 1..88: mol_type = other DNA
tccagaaccctgaccctgccgtgtaccagctgagagactcgcggccgctaaatccagtgacaagtctgtctgcctattcaccgatttt

SEQ ID NO: 2617 - DNA, 88 bp, synthetic construct
  source 1..88: mol_type = other DNA
tcttgtcccacagatatccagaaccctgaccctgccgtgtgcggccgcaccagctgagagactctaaatccagtgacaagtctgtctg

SEQ ID NO: 2618 - DNA, 88 bp, synthetic construct
  source 1..88: mol_type = other DNA
aataggcagacagacttgtcactggatttagagtctctcagcggccgcgctggtacacggcagggtcagggttctggatatctgtggg

SEQ ID NO: 2619 - DNA, 88 bp, synthetic construct
  source 1..88: mol_type = other DNA
tatccagaaccctgaccctgccgtgtaccagctgagagacgcggccgctctaaatccagtgacaagtctgtctgcctattcaccgatt

SEQ ID NO: 2620 - DNA, 88 bp, synthetic construct
  source 1..88: mol_type = other DNA
cctcttgtcccacagatatccagaaccctgaccctgccgtgcggccgcgtaccagctgagagactctaaatccagtgacaagtctgtc

SEQ ID NO: 2621 - DNA, 88 bp, synthetic construct
  source 1..88: mol_type = other DNA
taggcagacagacttgtcactggatttagagtctctcagcgcggccgctggtacacggcagggtcagggttctggatatctgtgggac

SEQ ID NO: 2622 - DNA, 88 bp, synthetic construct
  source 1..88: mol_type = other DNA
gatatccagaaccctgaccctgccgtgtaccagctgagaggcggccgcactctaaatccagtgacaagtctgtctgcctattcaccga

SEQ ID NO: 2623 - DNA, 88 bp, synthetic construct
  source 1..88: mol_type = other DNA
atcctcttgtcccacagatatccagaaccctgaccctgccgcggccgcgtgtaccagctgagagactctaaatccagtgacaagtctg

SEQ ID NO: 2624 - DNA, 88 bp, synthetic construct
  source 1..88: mol_type = other DNA
ggcagacagacttgtcactggatttagagtctctcagctggcggccgcgtacacggcagggtcagggttctggatatctgtgggacaa

SEQ ID NO: 2625 - DNA, 88 bp, synthetic construct
  source 1..88: mol_type = other DNA
cagatatccagaaccctgaccctgccgtgtaccagctgaggcggccgcagactctaaatccagtgacaagtctgtctgcctattcacc

SEQ ID NO: 2626 - DNA, 88 bp, synthetic construct
  source 1..88: mol_type = other DNA
accctgatcctcttgtcccacagatatccagaaccctgacgcggccgccctgccgtgtaccagctgagagactctaaatccagtgaca

SEQ ID NO: 2627 - DNA, 88 bp, synthetic construct
  source 1..88: mol_type = other DNA
ggcgtcgcgctggcgggcattcctgaagctgacagcattcgcggccgcgggccgagatgtctcgctccgtggccttagctgtgctcgc

SEQ ID NO: 2628 - DNA, 88 bp, synthetic construct
  source 1..88: mol_type = other DNA
cgtcgcgctggcgggcattcctgaagctgacagcattcgggcggccgcgccgagatgtctcgctccgtggccttagctgtgctcgcgc

SEQ ID NO: 2629 - DNA, 88 bp, synthetic construct
  source 1..88: mol_type = other DNA
tcgcgctggcgggcattcctgaagctgacagcattcgggcgcggccgccgagatgtctcgctccgtggccttagctgtgctcgcgcta

SEQ ID NO: 2630 - DNA, 88 bp, synthetic construct
  source 1..88: mol_type = other DNA
gcgctggcgggcattcctgaagctgacagcattcgggccggcggccgcagatgtctcgctccgtggccttagctgtgctcgcgctact

SEQ ID NO: 2631 - DNA, 88 bp, synthetic construct
  source 1..88: mol_type = other DNA
gctggcgggcattcctgaagctgacagcattcgggccgaggcggccgcatgtctcgctccgtggccttagctgtgctcgcgctactct

SEQ ID NO: 2632 - DNA, 88 bp, synthetic construct
  source 1..88: mol_type = other DNA
tggcgggcattcctgaagctgacagcattcgggccgagatgcggccgcgtctcgctccgtggccttagctgtgctcgcgctactctct

SEQ ID NO: 2633 - DNA, 88 bp, synthetic construct
  source 1..88: mol_type = other DNA
gcgggcattcctgaagctgacagcattcgggccgagatgtgcggccgcctcgctccgtggccttagctgtgctcgcgctactctctct

SEQ ID NO: 2634 - DNA, 88 bp, synthetic construct
  source 1..88: mol_type = other DNA
gggcattcctgaagctgacagcattcgggccgagatgtctgcggccgccgctccgtggccttagctgtgctcgcgctactctctcttt

SEQ ID NO: 2635 - DNA, 88 bp, synthetic construct
  source 1..88: mol_type = other DNA
gcattcctgaagctgacagcattcgggccgagatgtctcggcggccgcctccgtggccttagctgtgctcgcgctactctctctttct

SEQ ID NO: 2636 - DNA, 88 bp, synthetic construct
  source 1..88: mol_type = other DNA
attcctgaagctgacagcattcgggccgagatgtctcgctgcggccgcccgtggccttagctgtgctcgcgctactctctctttctgg

SEQ ID NO: 2637 - DNA, 88 bp, synthetic construct
  source 1..88: mol_type = other DNA
tcctgaagctgacagcattcgggccgagatgtctcgctccgcggccgcgtggccttagctgtgctcgcgctactctctctttctggcc

SEQ ID NO: 2638 - DNA, 88 bp, synthetic construct
  source 1..88: mol_type = other DNA
ctgaagctgacagcattcgggccgagatgtctcgctccgtgcggccgcggccttagctgtgctcgcgctactctctctttctggcctg

SEQ ID NO: 2639 - RNA, 37 nt, synthetic construct
  source 1..37: mol_type = other RNA
attgctccttacgaggagacgggccgagatgtctcgc

SEQ ID NO: 2640 - RNA, 53 nt, synthetic construct
  source 1..53: mol_type = other RNA
  modified_base 1: mod_base = OTHER; note = 2'O-methyl cytidine phosphorothioate
  modified_base 2: mod_base = OTHER; note = 2'O-methyl uridine phosphorothioate
  modified_base 3: mod_base = OTHER; note = 2'O-methyl uridine phosphorothioate
  modified_base 51: mod_base = OTHER; note = 2'O-methyl uridine phosphorothioate
  modified_base 52: mod_base = OTHER; note = 2'O-methyl uridine phosphorothioate
  modified_base 53: mod_base = OTHER; note = 2'O-methyl uridine
ctttcaagactaatagattgctccttacgaggagacagcaaggactggtcttt

SEQ ID NO: 2641 - RNA, 54 nt, synthetic construct; identical to SEQ ID NO: 2593
  source 1..54: mol_type = other RNA
  modified_base 1: mod_base = OTHER; note = 2'O-methyl cytidine phosphorothioate
  modified_base 2: mod_base = OTHER; note = 2'O-methyl uridine phosphorothioate
  modified_base 3: mod_base = OTHER; note = 2'O-methyl uridine phosphorothioate
  modified_base 52: mod_base = OTHER; note = 2'O-methyl uridine phosphorothioate
  modified_base 53: mod_base = OTHER; note = 2'O-methyl adenosine phosphorothioate
  modified_base 54: mod_base = OTHER; note = 2'O-methyl cytidine

SEQ ID NO: 2642-2643 - skipped (2 entries)

SEQ ID NO: 2644 - protein, 8 aa, synthetic construct
  VARIANT 3: note = Any naturally occurring amino acid
  VARIANT 4: note = W, F or Y
  VARIANT 5: note = Any naturally occurring amino acid
  VARIANT 6: note = Any naturally occurring amino acid
KRXXXXAF

SEQ ID NO: 2645 - skipped

SEQ ID NO: 2646 - protein, 6 aa, synthetic construct
  VARIANT 5: note = K or R
  VARIANT 6: note = W, F, or Y
LGKRXX

SEQ ID NO: 2647-2653 - skipped (7 entries)

SEQ ID NO: 2654 - protein, 16 aa, synthetic construct
APKKKRKVGIHGVPAA

SEQ ID NO: 2655 - protein, 9 aa, synthetic construct
LPPLERLTL

SEQ ID NO: 2656 - RNA, 20 nt, synthetic construct
  source 1..20: mol_type = other RNA
attgctccttacgaggagac

SEQ ID NO: 2657 - RNA, 17 nt, synthetic construct
  source 1..17: mol_type = other RNA
gggccgagatgtctcgc

SEQ ID NO: 2658 - RNA, 17 nt, synthetic construct
  source 1..17: mol_type = other RNA
agcaaggactggtcttt

SEQ ID NO: 2659 - RNA, 18 nt, synthetic construct
  source 1..18: mol_type = other RNA
gagtctctcagctggtac

1-271. (canceled)

272. An engineered T cell comprising a gene that is modified by contacting a T cell with:
(a) an effector protein comprising an amino acid sequence that is at least 95% identical to SEQ ID NO: 2435; and
(b) a guide nucleic acid, wherein the guide nucleic acid comprises a nucleotide sequence that is at least 90% identical to 5′-AAGGAUGCCAAAC-3′ (nucleotides 57 to 69 of SEQ ID NO: 2522) and a spacer sequence that is complementary to a target sequence of the gene.

273. The engineered T cell of claim 272, wherein the effector protein comprises an amino acid sequence that is at least 98% identical to SEQ ID NO: 2435.

274. The engineered T cell of claim 272, wherein the T cell is a primary human T cell.

275. The engineered T cell of claim 272, wherein the engineered T cell comprises a nucleic acid encoding a chimeric antigen receptor (CAR).

276. The engineered T cell of claim 272, wherein the effector protein and guide nucleic acid recognize a protospacer adjacent motif (PAM) selected from 5′-NNTN-3′ and 5′-TNTR-3′.

277. The engineered T cell of claim 272, wherein the effector protein is fused to a fusion partner protein.

278. The engineered T cell of claim 277, wherein the fusion partner protein comprises polymerase activity.

279. The engineered T cell of claim 272, wherein the effector protein comprises an amino acid substitution relative to SEQ ID NO: 2435 selected from I80R, T84R, K105R, G210R, C202R, A218R, E225R, C246R, and Q360R.

280. The engineered T cell of claim 272, wherein the engineered T cell further comprises a single-stranded oligodeoxynucleotide that is integrated into the gene.

281. The engineered T cell of claim 272, wherein the gene is modified by an additional guide nucleic acid that comprises the nucleotide sequence that is at least 90% identical to 5′-AAGGAUGCCAAAC-3′ (nucleotides 57 to 69 of SEQ ID NO: 2522), and an additional spacer sequence that is complementary to a different target sequence of the gene.

282. The engineered T cell of claim 272, wherein the effector protein comprises nuclease activity.

283. The engineered T cell of claim 272, wherein the effector protein comprises nickase activity.

284. The engineered T cell of claim 272, wherein at least one phosphodiester bond of the gene is cleaved relative to its unmodified state.

285. The engineered T cell of claim 272, wherein at least one nucleotide is deleted from the gene, at least one nucleotide is inserted into the gene, at least one nucleotide is modified in the gene, at least one nucleotide is substituted in the gene, or a combination thereof, relative to the gene in its unmodified state.

286. An engineered T cell comprising:
(a) an effector protein comprising an amino acid sequence that is at least 95% identical to SEQ ID NO: 2435, or a nucleic acid encoding the same; and
(b) a guide nucleic acid, wherein the guide nucleic acid comprises a nucleotide sequence of 5′-AAGGAUGCCAAAC-3′ (nucleotides 57 to 69 of SEQ ID NO: 2522).

287. The engineered T cell of claim 286, wherein the engineered T cell comprises a nucleic acid encoding a chimeric antigen receptor (CAR).

288. The engineered T cell of claim 287, wherein the engineered T cell comprises an mRNA encoding the effector protein.

289. A method of treating a human subject, the method comprising administering to the human subject the engineered T cell of claim 275.

290. A method of modifying a gene of a T cell comprising contacting the T cell with a composition comprising:
(a) an effector protein comprising an amino acid sequence that is at least 95% identical to SEQ ID NO: 2435, or a nucleic acid encoding the same; and
(b) a guide nucleic acid, wherein the guide nucleic acid comprises a nucleotide sequence of 5′-AAGGAUGCCAAAC-3′ (nucleotides 57 to 69 of SEQ ID NO: 2522).

291. The method of claim 290, wherein the T cell is electroporated with: (a) the effector protein, or the nucleic acid encoding the effector protein, and (2) the guide nucleic acid.

292. The method of claim 290, wherein the T cell comprises a nucleic acid encoding a chimeric antigen receptor (CAR).
